United States Patent Application Publication US 2022/0008368 A1 - sequence listing, part 25

SEQ ID NO: 2 - DNA, 58617616 bp, Homo sapiens (residues 52,104,553-54,275,575 of 58,617,616)
  modified_base (1)..(60000): a, c, t, g, unknown or other
  modified_base (24448981)..(24498980): a, c, t, g, unknown or other
  modified_base (24552653)..(24552752): a, c, t, g, unknown or other
  modified_base (24891257)..(24891356): a, c, t, g, unknown or other
  modified_base (24895791)..(24895890): a, c, t, g, unknown or other
  modified_base (24898314)..(24904771): a, c, t, g, unknown or other
  modified_base (24908590)..(24908689): a, c, t, g, unknown or other
  modified_base (27190875)..(27240874): a, c, t, g, unknown or other
  modified_base (58607617)..(58617616): a, c, t, g, unknown or other
gaaatccagaagagacatatttggcttatttggtataaaaatcatacaggaagcattgtcaaatacaaaatggtgtttggctttctgtgggctgtacttgtataaatatgaaattggcatgtattccaaaattatggaaaactcttataattctgatatgacttactatatgttattattttattttttgagatggaatctcactctgtcacccaggctggagtgcagtggcaccatcttggctcactgcaacctctgcatcctgggttcaagcaattcccctgcattagcctcgcaagtacctgagactataggtgtgcaccatcacacctggttaatgtttgtatttttagtagagatgcggtttcaccatgttggtcaggctggtcttgaactcctgacctcaacccacctcagcctcacaaagtgctgcaattacagatgtgagtgactgtgcccagccacatgttattaataattataattgttggctgggcatggtggctcaaacctataatcccaaaactttgggaggccaaggcaggcggatcacctgaggtcaggagttcaagaccagcctgaccaacatggagaaaccccatctctactaaaaatacaaaattagtcgggtgtagtggcgcatgcctgtagtcccagctactcagaaggctgaggcaggagaatcgcttgaaccccagaggagaggttgtggtgagcccagattgtgccactgcactccagcctgggcaacaagagcaaaactctgtctcaaaaaataataataattattattattattgactattatgtaaaatggtggtatgtcacagaagtaaccaaaatttccattatagtcaattgtggttttaataacagctgtcctgagacattttgttgccacaggcaattgttgtcttgtttggatcctcttcaaaagttggtttataatcagctacaggaatttgataggtgctctggaatgcaagtttctgataactttggaaaatgtgacattagaatagaggaatagaggaaagaactttcaaaactttcatggataactaaaatgttcatgaatatcaaacacaacacacattaactgcatggactgaactaataggagtctaaagtaatctttctgattttttcttttgatcctttgttttgttttgcagagtcaaggaaacttttcttttgagctattgacagcaattttttttttttttgagacagttgcccaggctggagtgcaatggcatgatctgggttcactgcagcccctgcctcccagcctcccaggttcaagcgattctcctgcctcagcctcccaagtagctgggattacaggcacccaccatcatgcccaggtaatttttgtagagacggggtttcaccatgttggccaggctgatctcgaactcctgacctaaggtgatccgcccaccttgcctcccaaagtgctgggattataggcatgagccaccgtgcccagccgacagcatttaacaattgaggaaagtatactgctgtgaagaaaatttggaacatatttgtttctctctacctgctttctccagaatttggaaactatttctgagtattcttttttttttttttttttttttttgagatggagtctcactctgttgccaggctggaatgcagtggcacgatcttggctcactgcaacctctgcctcccgaggtcaagcgattctcctgcctcagcctcctgagtagctgggactacaggcatgtgccaacacacccagctaatttttgtatttttagtagagacggggtttcaccatgttggccaggatggtcttgatctcttgacctcgtgatctgcctgcctcagcctcccaaagtgctgggattacaggcgtgagccatggcgcccagcttacgtttttcaatttttatgattttccacagtttggactgaattctaattttttccagctacatgtctctgaaataatgttttcaattttttcttctttcttttcttttttcccccatattttctaatttgaaatcactgaaaactaaactgtattttcttgaagccctgataactgaagctagacaacttaaacttcagaagaaaataacagcaacctattcacatacataagccactttcatacctatctactgatgtatggacttcagagtaatatggcctgtatctattttccaggattattctttgtttttcttccttcctcctgctattttctcttcataggacacgacactttacaaactgctaaaaatgagctttccaaataacatgggacttgcccacctgaaaataaactgtcctagccatgaaggatcagatgaaacctgatttttttttttttgagacggagtctcgttctgtccccaggctggagtgcagtaacgtaatctgggctcactgcaacctctgccttgcaggttcaagtgattctcctgcctcagcctcctgagtagctgggactacaggcatgtgccactacgcctggctaatttttgtatttttagtagagatggggtttcaccacgttggccaggatggtctccatctcttgacctcgtgatccgcccgccttggcctcccaaaatgctgagattacaggcgtgagccaccgcacccagcctctcccaaagatttttaaaggagaaaaggggaaatgtgaaaggaaaataaatcttggcacccaacactcactaagccaaagggaaaagtcaagctgggaactgcttagggcaaacatgcttcccattctattcaaatcatccctctgctcactgagataaatgtgtgtgattgcttcctttgaaaatgcttaccagaaacccaaaagaatgcaacctttgtcttttatctacccgatgacctggaagcaccctccctgcttggacttaccctgcctttccaaaccaaaccaatgtgcatcttacacattaactgatatctcctaaaagtgtataaaaccaagctgcgccccaaccaccttgggtatatgtggccaggacctcttgaggctgtgtcacaggcaagcatccttaactttggcaaataaacttgcaaaattgactggaacaaaagaagtaatcttcagagaaaataaaaataacagggaaaaacagggagattacatgataaaaatgtcaacttacaaagatgatttcagaaccatcagtgtgtatgcactaaaaaacagctgcaaaacgtgaagcaataagtgacagaagtgaaagaaatacacaaatttagactgagcaaagaggattattagggtagtcaaagtactctgtatgttaccataatatgtgaatatgtgccattttacagttgtccaaacccacacaatgtacaagtgtgagccaactataaactagggatgttggatgataatctaccactttggtggaggatgttgacaatggggaaggctatgcatatgtgggggaaggagctatatgagaaatctctgtaccttccactgaattttgctgggaaccaaaaattgctctacaaagtaaagtatatcatagaaaaaaaattgaattagaaaataggttaaaaatatgagaaatttcaccgatgcagatgcacaaataggcaaacgaaaagattttccatattactgtccatcaagtctcagaaattaacaatgttctatttctttattgtaattgaaaactgaacagcaaatgaatttttatggtttgttttctccaacaaacttaataatattaaaatatgtgagaaataatatttattgcaacaggttatgagggtggaaacaaacagtctcacaatttgctagaagcataacagagcttactgacattttcaaggaaaaacaacaaagaaagaagtcatcaaacaagatggtatcttgacaaaggcacagagctccacaactgcttcatactctgcacacaataaatcctctcagagagatgaaaggagtgatgacaaatgggcttgcatttgagctgtggacactatcactggtattattcatataaccagggctctatatcacccctctggagaagaaagtgcaacacaaagtctgtgtaacaaaggaaagcaaaagtagcaataaaggtccagagaaatacacacatgcaaatacagtactgcaaactcagtaaaaggagtttttgactggagtgtgaactttcaacttgaagatacatttcgcagggacattcacccaaagcttgagagctagagcagagagacttgcttgcagtcagtaactgagtagatgaaatgcgtaatttttcactaggtgataattccctttgggaagaagtgccttatctttaattattccactttttgttatatggttcatgcttttgaactgcagttgtctgaaacttgcttgctattgaattgtgtaacaccagataatagcaggttgtcaaaagataaccccagtggataatttaagctgcttttatgagaagcctggtgctaagctgccttacacagtctttttacagtaaccataaaaaaaactgagtttatttgatcatgtattatcccttttcatataaggtcatattagaggaattcttggaagaggttttcaaactagtcctttgggcatttaaaaaatcattatataaacgtacacttcttcaatacataagaacaaacatttttcctttacaaaaaaacctcatttttaggccaaaataaattacaacttgctgaaataccttttatggctcagtgctcattccagctatataaaattatattttttgcacatcttcagaaattagagatactgagagagagtggttactttttttaggggggcggtgatggaatttcactctgtctcccaggttagagtgcagtggcgcaatatcggctcactacaacctccacccacagcgttcaaatgattctcctgcctcagcctcccaagtagctgggattacaggcacctgacaccatgcccggctaatttttgtatttttagtaaagatgtggtctcaccatattggtcaggctggtctcaaacttgacctcaggtgatccacctacctcggcctcccaaagtgctgggattacaggcgtgagccactgcacccggccagagagagagtggttacttctaaaatgacatgatgatataaccctggcttagggaacagatcaagttctaaatctcaggaataaaagatactcattatccaagccatatagtcttgtactatatacatattaacagtctatgcaatgaaaaatgaagaacagaaatttcataaaactttaaaaacacacaacataggcagggtgtggtagctcatgcctgtaatcccagcactttgggaggtcgaggcgagcagatcatctgaggttgggagtttgagaccagcctgaccaacagggagaaaccccatctctactaaaaatacaaaattagctgggtgtggtggtgcatgcctgtaatcccagccacttgggaggctgaggcagaagaatcgcttgaacccaggaggcagaggttgtggtgagccgagatcgcgccattgcactccagtctgggcaacaagaacaaaactctgtctcaaaaacaacagcaacaacaacaacaaaaaagacaaaataacacaacataaaaatgtaaagaaaacatttcatgtacaagctactccatttggcaacgtgtactaagataaaaacttatctacaaacagaatataacacaaagaaaatgtgatttaaggagtgatctcaggtccacagctcttcagttcttccaaatttgtagatcagagtggttgggtaacatatgcaccaaaaagaatccacatggaagcaataagtaccccaaacatcaacatgaaaccaacgaaaagccaaactcaaggacctgttcttcctaaacagccactttcatagctatcacctctcacctgagcattggatacagcatttatcatgaagaaagccaatgtgggaaatacaccacatgtgtgaaaggcatggttcaactgttctggcctacaatacaccactgctgcgtcattatccaccagcctgtaaaaaacaatatacctgtcacaacagacgccacaacatttcttctctcactcgtcaatacattcacattctggccattgaaaattatctaggaagactgccattttctacttcttaagcataaatttttcattaaatgctgtatccccacttcctcaaacacccacgcggacttcaggcatgtgcacaaggaagactgctgctccgcagtctggccggcatcctccagctccacctcagccttgggagcccacaatgttctatttttatttgatcccatctgcttccagcaatcactgaaaagaaacagcctttaccaaacactccaaaatgtctttgtggtgacgtcattaggaactcataactgtccccaggaattcgcagtgggaacaaaggttttcaggaatattctcagctcaccaagcttgcacattatcaatattggtgaattgacaaattgcagttttttgcaaagctgctatctcagaatcacaaacttacatctcacaatcagctggctccctccccccaagacattggtacagtcatcccacattagctgctgttttgctttccatgatttcaattaccagtggcaactgtggcccaaaaacattaaatggaatattcccaaaataaataactcggaaattttaaactgtacactgttctcactaatgtgatgaaatttcacattgttccacccaggacataaatcatccctttatacggtgtagccacacagaataacctacccctctctcagtcacttagtagtcatctcagttagcgttgttagagtatcatcgtgtttgtgttcaagtatctcctattttacttaattatggccccaaagcacaaaagtagtgaggcttgcaacttggatatctcagagaagctgtaagctagacacaatagcatgtacctgtagtctcaggtagtctggaggctgaggtgggaggaccactttttgacgctgcagtgtgctaagatcttacctgtgaataaccactgcactcagcctgggtgacatagcaaaaccccctaacaaaaaaaaaaaaaaaaaaaaaaaaaaaagagaaagcaagaaagctgtaaagcgcctcctttaagttaaaaagtgaaaggttattgatttaataagaaaaaaatacagatgaagatgctaagatttatcataaatcttctgtacaagtgtgaataaaaataatcagtactagctttgctgtcacacctcaaaacttgactgaaactatatatttatggttgggtactatccactttcaggtatccactagaggacacttggaaggcatcttgtgggttaaagggggactatggtatgggcaaaaatctatgttgtttgatttcgccatagaaaacaattgtcgcacattattttaaccagcagagtgtaatgcagtgtctgttagaagttctttactaaggtgggataaatctgtgttggtgaaaggaacgtcactgagttacgaaaacgaataacattttattaattgaaccatgagacttctgatacattttgaatgtaacagcagtaaaatatagagtaaatacttcaatgtgaatctggcctgtgaccatgctattctgattcttttgattaaattctcctctctgataactgctgtcttccacttccaagaataagactaattttacatttatctttgctatataacagctgtcattcaatggagatgatcatcatttcctctgcattatttctcccacacaatccatccctagtaacctatcacttgcctctcatgaatacccttaatattccatcaatgtcctcactggtatttcagtcagttggttgtgcaattattttctacaacccaaagtggcactctacgtgttcatggacacctggaacacaagcacaacttacatcataaacttacattattctcccagttactccatggtgtgtaactcacagaatattgaattttaaaattcagtgaccttaatcttcaggaagcatggaaatgaaggagccacactgaatgaaggaggctctctcatcttgttgattcattcccagataccacaatgaaggatatgtaaggaagatgatagacttcaaaccttaggataaacgtcatagtctagtagctattttaagaaacgccccattggccaggtgtggtggctcatgcctgtaatctcagcaacgtgtgaggccaaggtggcaaatcacttgaggccaggagcttgagatcagcctggcaaacatggtaaaacaccatctctacaaaaaaatataaaaattatctggacatggtggcatgactgtaatcccagctacttgggaggctgaggcacaaattgcttgaaaccaggatgtggaagttacagtgaggtgaactggtgccactgcactacagcatggggaacagagcaagactgtcacaaaagaaaaaaaacagaaacctcaaatttaatgtaatattttataaactgaatgagccattttcacacatgcacttgctcctttaaaatacatactgtcctgagttttaacaaatgttgtctggtagttattctgtaataatattccaggccaatcttggagaagcagatttggttatccctagtatgatttcaaagatgtgtagtctgtttaaaaaactggttgaaatttgtgccacattgattacatttccaagttttctctcaagtagggataatttggtaaaggctgaagacacactactgcttccaggtcctttcatgttcagcatacttacaggatttttctcctttatacgttcaatcaaactgcaaaggcgtggacattggttttgtctcactttaagttctgggtacatgtgcacaatttgcaaatttgttacataggaaaatgtgtgccatggtggtttgctgcatctaccaacccatcacctggtattaaggcaaaaatgcattagctatttgtcctgatgctccacttccctgcccttcccacccccatcagcaggccccagtgtgtgttgctcccctccctgggtatatgtgttctcattgttcagcttccacttttaagtgagaacatgtgctgtttgattttctgttcctgtgttagtttcctgaggataatggcttccagctccatccacatcgctgcaatggacatgatctcattcctttctatggctgcatagtatcccatggtgtatatgtaccacattttctttattcagtctatcactgataagcatttgggttgattccaggtctttgaacatttcattttttaaaaccatttatttggaaggttgtctctagtatgaatactctttccattttgatgttcgggtaaaaaccttagcatgcacattacatttctgtggttcctctcaaagatgtatattctgatgcctagtgagttccaatgcctggggaaagcctctgacacatacatttatatgatttcctttcagtataaactctcttatgacaagtagtgattgaactctagtaaaggttttgccaccctcatttcatttcatacatctatgcccttttaattacctagatttacaagttctggcttttgagtagaattcttgccacacgtattacacttctgtgatttttctccaggatgtatacatcctggaatatatatacaaattcttacacctagtgagtagtgaatactagcttaaaacttaggtatatttactgcatgtgtaaatgtattaggtcataactgcattgctacaaaaaaaaacctgaggctggctaatgtataaagaaaagagtttaattggctcatatttctgaaggcttaaatgaaaacatggtgctggcatctgatcaccctctagggaagcctcaggaaggttaaaatcatggtggaaggcaaagcgggtgtcggtatttcacatggtgagaatgagggcaagcgacagggaagtgctatgcacttctaaacagccagacctcaagagaagtcactattgccaggacagcaccaaggggatgacgctacatctttctcagtttgagaaatccacttccatgattcaatcacctcccaatgggccccacctccaatactggagattacaattccacagggatttcaagagaaggggtaaatatacaaggtatatcagtaagtaggaattattcggtgattccagaaactaggacaacgtctaaggccttgtcacattgagtttagttgtaaggctctctccagtatgtcttattcgatgtttagtgaggcctgagcgacaaataaaagatttcccacactcattacatttataaggttttttgccagaatgaattctttggtgtttgctgagggaaaacaaccgcccaaaggctttgccacattcaatacatttgtatcttttctctccagtgtggattctctggtgacttacaagatgtgaactatgcctgaataccttgccacattcatcacatttatatggtttctttcctgcatgaattatctgatgtgcagtgaggtttgagctccgtttaaaggttttgccacactcattacatttgtaaggtctgtctccagtatgaacagtctgatgaagtctaagatggacacgctgactaaaggaattcccacactgattgcatttgtaaggtttctctccggtatgaattctctgatgtctattgagtgtggagccctgattaaaggctttgccacattcatgacatttgtatggtttctctccagtatgaactcttcgatgccctacaagatgtgaatactgactgtagaccttgccgcattcattgcatttgtaaggtttctctccactatgaattctccgatgcactgtaagacgtgaacattgactgaagaccttgccacattctttgcatttgtaaggcttctctccagtatgaattctccgatgccttgcaaaagctgaacggtcactgaagaccttgccacattctttgcatttgtaaggtttctctccagtatgaattctccgatgcactgcaagacgtgaatgttgactgaagaccttgccacattcattgcatttgtaaggtttctctccagtatgaattctctgatgagctgcaagtcgtgaatgtatgctgaaaactttgccacattcattgcatttataagctttctcgccggtatgaattctccaatgcactgcaagatgtgaatgcttactgtacaccttgccacatttattgcatttgtaagttttctgtccagtatgaattctctgatgcactgcaagacttgaacgtttactgaagaccttgccacattcattgcatttgcaaggtttctctacagtgtgaattcgtcgatgcactgcaagacttgaacgtttactgaagaccttgccacattcattgcatttgtattgtttctctccactgtggattctccggtgacatacaagatttgatctatgtctgaatgccttgccacatacatcacatttatatggtttctttcctgcatggattacctgatgtacagtgaggtttgagctccgtttaaaggttttgccacactcattacatttgaagggtctctctccagtatgaactgtctgatgaagtctaagatggacacgctgactaaaggatttcccacacagattacatttgtaaggtttttcaccggtatgaattctctgatgaactgcaaggtgggaacttttactaaaggacttgccacattcattacatatgtagggtttctgtccagtgtgactcctttggtgtcttacaaaatatgaattttttctgaagatcttgccacatacatcacattgatatgatttccctcttgtatggactaccttgtgtacagttagtagtgaggcccgatgaaaggctttgccacactcattgcatttgtaaggtttctctgtagtatgtatcctctgatgattaataaggctggaagacgctttaaaggctttgccacattcattacatacatacgttttttccctaatgtgtggagaaactaaacaaccattattacctgtcttctccgtttcattacattcataaagtctcccttcagtttgaactttctgcagttcagccagacgtgactcaaagtttgatgtaagctggttttcaatatgattgttttctacatccccttgactatgttgatctcttttaccagtaagattgttttcatggggcactggcacttctttatcatttgtttcaccatctttccattgaaattcaaggtcatgtagatgtttctgtatttccctgaagtataaattttcaatatcatagctttgatgtctttccagtgccactgtttggaacctttctcctgtattactgttctctgttggtggtaattccttgatcacacatttaggagagatacctgcaaaatataatgaacatgagtttttttttaaactactactattgataaacaaacattttatattggaaacatacctacactaaacataatctttatactagacaggtgtgagagttctccaccatgatcttttatttttagaaatacaaaatgaatagaagtctatagtaaagaaagggtgactacatgtaattcaaattaagtttaggaaagcctagtttcaaacatcctatgaccaaaagacttatgttgtgcaaacatatattggcactaaaacaagtattttgcaaccaatgacaccaaattacgaaccgattggcagaaaatgtggctctctcataagagaataaaagttatatatatttacttcatatttactgtgtacaaacaaatgccaaaccacagcaagatatagtgtaatggtaaatattcacaagataaactaattaataatcatcatataaattaataaataaaacactctattaacccatgataaaaccagcaggtaagtaaaatacaatatacaatatacttagaattccatactataaatttgtatattgcatatacaagtttgcatcatatgcaaatacacaaatttatagtatggaattctaaacaaatctccctttataataagcaagaacatatattctagagacagcatatgataactagaaaatatgttgagatcactgacttttaaagataaaagaaagataaatatgtctatggccataccacctggaacacagctgatctcagaagctaaacagtgtcagatctggttactacttggatgggagaaaggtaaatacacaacataatacagaataaaaagtggggaaggaaaaatactgactatgatttcatgcctacacctatgtaacaatcaatagagcaactccctatctattgtcattttttcttgagacagagtctcactctgtcacctaggctggagtaaagtggcataatcttgcctcactgcaacctccactcctaagactcaagcgatcctcccacctcagcctctcaaatggctgagaccaaagatgttcaccaccacgcccacctaatttttttgtagttttggtagagacagagttttcctatgttgctcaggctgatctcgaactcctgaggtcaagcaacctgcctgctgcagcctcccaaagtgccgggattatatacaggcatgagtcaccacacctggtcctattcattgcctctaattacctagttaactggccacaaaatatatatcatcaagagatttctacttgaaaagcatatgaactaagataaaagacaacaaacactgtttggaagaaactacaaaatgaaaacttacagatacaatgaaggctgctttgatataaagacttaatgtctgccaaaattcctatgttgaggacccaatcctcaatgtgatagtatttggaggtgtggtctttgggaggcaattcggtcctctgccatgtcaggacacagaaagagaaagccatggtaaaccggaaaaagggcccatgccatgccaagaaccaaaatggctggttctgacatgttagacttctcaccacccagatctgtgaaaagggaatttctgttgtttcaaccacccaatctacaatatctactataggtagccatgctgactagggtaaagccaatatgctatctcattataaacataaaacaatgttgatatgctttatttaacaaagaaatctgtgagtctttactaaaaaacaatattctagactagctaacagcactaacttgtttaaaaagtcttgaggtaaattaccactatttaacacacaagcagttagtatgcccacgggattcatgtatctacatccaatttacaaagaaagtaagatatgcacctacgtttgcaggatcaaacattatgtttttttcaaaaactgcccaagcaggtactgcaggtaacaggtcaccccaaatactaagagtgtataaagaaatacttcaagagccatgctgtgttgccaaaagcattattcagccatccccatgaataacagtatctgagtcatcattccctgcacataatgatttagacagtgttctcagaaagtgatcaggccaaggcaggtggatcacaaggtcaggagttcaagaccagcccggccaagatgatgaaaccccacctctactaaaaatacaaaaattagctgggtgtgggggcaggtgtctgtaatcccagctacgtgggaggctgaggcagggaattgcttgaacccgggaggtggaggttacagtgagccgagatcacaccactgcactccagcctgagcgacaaagcaagactccatatgaaaaaaaaaaagaaaaaagaaaaaaaggaagtgatcaagtgaatgagtacggtcatcccttacagagtgagagtagtgtgggagatgaaggagttatgcaataatgggagtgtaaaacttatatgctagtaagtagccaggtattccgtctggaacaaagtactattttaggaaaggccagggaagagaaaaggcaagaggaaagggcaaggagtaatgtgcatggggcagcagggtttgtgcttgcagagctgtaggtatataatttcaccaggaacagttaaaatcctgactttggacaaaaaaagaaactaatttagaagtagcattatactggccaatatttaaatacgtgaattatactatgggcacaggacaagggaaaacagttaaaaaggaggcagtgtgaggatatgggaagaaagcagacttatgtctttataatatatgctatgaattttatcaaattgaatgtcccatgagttatatttccaggcatatgctcaacaaccctacatatcaagagatatgcgaaaaaatgttcctacaatataatcctgaagaaaaaatttgataacagccatgaagaggagatggatgaatttattttgtacacacacaaaaagacaacataaaaccttattgatagtacaacaatgttaaggagacttgggatgcagaagaagacacgctggcaaaatgggcaaatattaatctgaaaaaactaagaaagcaggaaattgttgtcaaggtttaaatacacgttcatggagacacagtatatatggaagtaatctgggatatcaaaaacataacatgggagcagacctgtaaaggagtcatttttctatgtgactgaagtcaaactgttaccagtttaaaacaggatgttataaatctaaagtgttttctgtaattgcaatggtaaccacaaagaatgtatagaagacacacacaatggaaataaaagtatgtcaagacaaaagaatcaactaaataaacacaaaggcagtaacggatatgaagaacaaaaaaatctaagagatataggaaacattcagcaaaacagcaagagtgagtccttctctatcagtaattacattaagtgtaagtggcttaaactccacaatcagaagatagagactggctgaatgaattttaaaaacaggctccaactacatactatccacaaaagattcatttttatttgaaggacacacgcaggctgaattgaaagggtgaaaaaagatatcccttataaatggtaatagaaagacatcggaggtggctaaactggtatcagtcaaaacagactttatgtcaaaactggtacaagagacaaagaagagcattatctaataattaaagggttaattcactagaagatataccaattatagttatatatgcacctaatattagagatccttaatatatgaagcaagagaaacataactaaagggagaaaagttccacagtaataataaaagacttcaacggaccacttttataaataggacagacagaaaaaaagtaagtaaataggcaacctaaactatacgttaaattggacctaacctacatatgcacaacgcatctcccaaaaacagcacgaaagaattttttcagaacttcacacagaacattcttcaaaagaaatatttaaaagtaaaactttttaacacttcttttttgttgaggctgagtctcgctctgttacccaagctggaaggcagtggcgtgatcttggttcactgcaacctccgcctcccaggttcaagcgattctcctgactcagcctcccgagtagctgggactacaggcgcacgccaccacgcccagctaatttttgtatttttagtagcgacgcggtttcgccatgttggccaggctggtctcaaactcctgacctcgtttaacacattttaaagactgaaatcataaagtgtaacttatcccttcataataaaataaaactagagatcaacagcagaaaaaaaattagaatatcaaaaaatatgtggaaacaacatattcctaaacagccaatatgtcaaattggaaatctcaagggaaatgataaaatatctcaaaacaaaggaaaatgaaaatagaacatgccaaaacttatgtatgcacagaaaacagtgctaagatagaaaactgttagatataaatgcttctgttaaaatagaagatctccaatagaacagaatagggaacccagaaatacagccacagatctccaatggaatggaataggaaacccagaaacacagccacatacctacaaccaactgatctttgacaaagtcaacaaaaacaattgagataagacattctattcaataaagggtgctggaaaaactggctagccatatatagaagaatgaaactggacccctatctctcatcatatacaaaaattaattcaagatggatatagacttaaatgtaagacctcaggctacaaaaatcctagaagaaaacttaggaaaaacacttctggataaaatataattttttaaaaaaaatttattcctcattccctaagcatgacgggaaaaaatatataggttttataaacatcagttgagaagtccttgaagtgcaagaaatgggctacatgtataataaagtaagatttgaaaataataattcagtataacatgatggacttgaaagcagacaggagaataattattataatatagcacttgttccaaaaaaaaaaaaaagtgtgatttaaagaaaatccagcaagttatatttaggaaactgaaacttactacagaaaagcaatgtgtctgatataacaagtatgaccaggccgggcgcagtggctcacgtctgtaatcccagcactttgggaggccgagactggcagatcacctgaggtcgggagttcaagatcagcctgaccaatatggagaaaccccatctctactaaaaatacaaaattagccaggtgtggtggcacatgcctgtaatcccagctactcaggaggctgaggcaggagaatcgcttgaacctgggagacggaggttgcagtgaggtgagatcgcgccattattctccagcctgggcaacaagaatgaaaatccgtctcaaaaaacagaacaaaacaaacaaacaaaaacaaagtatgaccaatctctttcatggtatttctacaatgaagatagtaactatattaaaaaaatatattcaaggtattaaaaaatttccaatgagaagaactgtaatcaattccattaacaattttttttttttttttgagatggagtctcgctctgtcaccaggctggagtgcagtggcgcaatctctgctcactgcaagctccgcctcccgggttcatgccattctcctgcctctgcctcctgagtagctgggactacaggcgcccaccgccacaccctgctaattttttgtatttttagtagagacgggttttcaccgtgttagccaggatggtctcgatctcctgacctcgtgatccacccgcctcggcctcccaaagtgctgggattataggcgtgagccaccgtgcccggtctcattaacaaatttaatagtaggaattaagtcaggagaaatgggagtaaaagaaataactgaaactgtcttattacaacactattgagtttgtgtaagttttagagaaactgctcctgagctataccatctgtactaaagaaagaaatcttgtaaaatatataaaatgatatacattccccaatacaacactacctcaaaaagaaacataaaacaaagaaaactgagtatcctcaaaaatatggaactgattattaaataaataaaaacaaagttcatttacaatacatgaaaatgcaccagattaaagtagcggtcacttaaaacaaattatgtggacttaaaaaatataagctttggccgggcgtggtggctcacacctgtaatcccagcactttgggaggctgaggcgggtggatcacagggtcagggataggccaagcgtactggctcaagcctataatatcagcactctggggtgccaagaccagagaattccttgagcccatgagttcaagagcagcctgagtgacatagtaaaaccctgtctctacacgggcatggtggcacgcacgcataattccagctacttgggaggctgagggtggaggattgcttgagcccaggagacagagattgcagtgagctgtgatcacaccactgcactccagcctgggcaacagagcaagaacctgttttaaacaaacaaaaaagcacatggacagaaaacagggaattggatattttaactctgccataaagttctctgcgaacttcagctctggaaccaccactgatgtacaaagaaggcagcagaatatatatacaaaggtgacagtgaaaggccagatgcagcattgtgaagctttttatttttgaaccaataaggcttcagtctcaaataacggaggggttcccaagaaagacaacagaggaaatacaaaaatgcacaagggcgaatctgaacttctagaaggaaattatactcacctaggaagaccaggttcctatagttctccaacatcacatccttgtacaaagctttctgcacaggctccaggcatttccactcctcctgagagaattctatggctacatccttgaatgtcaaatgcccctgaaatgaaaaacacatttcaaaaagaagcaatatgagagctcttctgtttacacaaaatgaggagagaactatcacatcactttgaagtgtgtgttttgacatatctatatggcatctgtgagaaagttattggtccctaattttagtttgttataaaatacaataggagactattatattctctacatcagtgtatagttctatttttgtggacaatacaagaaatacacaaataagaaaaacacatggttatcccttaaaaagtgttagatattatgctccatacatcaactgtgtctaggtgagctagtatatgagtggtgttttcagagatgacaatgtctacagcggctttaaaggtcagaaactaaaaactgtgatgaccagagcaacagcaatgactgaagttttggaacactccccacgtgctgggcattattccaaatgctttacatgttctaattcaaataacaacatgatagcctatgagagagagacttgttccatgttactgtgtcacagacacgctaacaaacttgcctaggtcaacaacctgaaaatggcagagcaagcatctgaacccagatgtctgagaattagagttgaatcaaaacaatcaaacagttacattatggttacagaatatcctagtctgtctgtgctgctataaccaaataagacagactgggtaatttatgaacaataaaaatatatttctcataattctgcaggctgggaaatccaagatcaaggtgccagaaggactgatgtctgctgagggatgatccctgcttccaagatggtgtcttgttgcattttctggaggggaggaatgctgtgtccccacgtggcagaaggaacagaagggccaaaaagcagtgaactccgtaggataagcgttttgatatctcactgaccagaacaccatatcccattgataagggcagacccctcaggatccaatcacctactaaaacccaaacctcataatacttggagattgggcattggagattaagtttcaaatgaattgtggaggagagaaaaacactcagaccacagcattccatcttgccccaccaaaattcatgtactcctcacatataaaatgcattccatcccaatggccccccaaagtcttaactttttctactaccaattcaaaagtctatagtctacagctgcatctaactataatctaaatcagatatgggtgagactcaaaaatgtgtttcatcctgaggcaaactgctctccagctgtgaacgtgtgaaatcaaacgacttaagtgcttccaacatccaacggtggcgtagacacaggctaaatatttcaactccaaaatgcagaaacaggaaagaagaggtagccactcccatgttaagtctgaaactcaaatagggcacacatattaaatcttaaggcttgacaataatcttctttgactctatgtcccaccttctagacatcctggagtaggagttaggtccccagtgtcctggggatccctgccccattagttttgttgggatcacccacatggaacttctcacaggctgtggtttcccgagctgggatcacatactggtgactctacagttctggggtctcaggcgtggtcctgcttccagggctccccttgaccttgccctaataagcactctctaaggtgtccctgcctccatggctaggctgagaattgccttagtggtgacctcctgtggtagcactgaaaggaacaggatgaaaggttaggggccactgagcaaaaagataactgacgtaaaccggtgtctgcaataacacagaaagacatgagggtgaagatctagtaccacagatatctgcagtaccagagtctatccacaatagtacagaaaataggggagcttctgagtagaaagcagcaaacctcttcaatagggagatgacaagcaaaggcccagagaaaaagcatgggaagtctccagaatctagggtagttgattggaatgtcctccctgaacaaagcagccaccaaatctgggcaggcagctgattttttcaaatgctgaagtcacaaaagaagacaataaaacatacaaagaaacagggaaatacggtctacaaaaagaaaccaactgaatctgtacaaacctacatgaaagaaatggcaatttacatcttggctttgaagaattaaaaagaaatgtgggccgggcatgattgctcacaactgtaatcccaggactttcagaacgccaggcaggaagatcacttcagagcaggaattcgagaccagcctggccaacattatgaaaccccatctctactaaaaatacaaaaattagccaggcatggtggcacatgcctgtaatctgaggctgaggcatgagaattgcttgaacaggaggcagaggttgcagtgagctgagatcccacccctgcactccagcctcggcaatagagtgtgactctgtctccaaaaataaagaaaatgcgaaggtaggcagatcacctgaggtcaggagtttaagaccagcctggccaacacggtgaaaccccgtctctactaaaaatacaaaaattagccaggtgtggtggcacgtgcctgtagtcccagctactcagggagactgaggcaggacaattgcccgaacccaggaggcagaggttgcagtgagtcgagatcatgccactgcactccagcctgggcgacagagcgagactccatctcaaaaaataaataataaataattaaataaaataaagaaaatgaagagagtctaatgggcccatgaaaaaccatcaagcaccaagaacatatgcattctgggagtccaacaaataatgtgaatatatctaacattactgaactttacataagcaaacaagctttaatgaaagacataataaagatattatcaaagactgacaaactcgattctttttggaagacatggtgacataaaggcctgcaactgaaaaaattcagagccatgaaaacacaaacaaaatatgtgggaattttttttttttttagaagacagagtctcactgtcacccaggcaggagtgcagtggcacgatctcagctcactgcaacctccacctcccaagttcaagggattctcctgcctcggcctcccaggtagctaagattaaagacgtgcaccatcatgtccggctaatatttgtattttcagtagagacagggtttcaccatgttggccaggctggtcttgaactcctgacctcaggtgatccacccaccttggcctcccaaagtgcctggattacaggtgtgagccaccacacccggccaatatgtggaatttaaataatatgtggctgtgttgtgtaaaaggagaaccataataattttggaaagaaaatggaggggtttgccaatctacttgtgaacctattatgttatttataatctaaaactttataatcaaatataatctacaacaagatatacagaaaaattcaaattaaagattcaagcaaataaaatgtaagcaacaaaatattagatcttaaaaaaacacagtattttataatcacacagcgagccaggccttccaaagaaagatcagttatttatttttgcttttgtggtatagcgtcctaacagaagcaaccactctttaaactgtccaacctgaaggaaccctcaaacacctgtggtgaagagagcattgtggcagccatggtgaaaaattataaaagatccatatgtcttcatttagagattgttccaaagaggatgcaaaacaagctattactgcttattaacaaaaaaagatgtatctttgaaaaactggcacaatgaaatttcacaacagaacatgtactgaagaattgttttctaaaatctcataatgacacgtaaatgcatcttgacacctctcactgactcttgccacagaacttacaactgtagctccccacggaaacatgagggatgatggagaaagtgacagggaaaagaaacccgggttcctccaggttgggtaactgaaagagtgattgcctctttaggatggtgcatttcctattttcctggatctggcaagatttcccactaccctaaggtgcaatggtgtcctcatacaccaacgacacatattgggtggatttcccacccaataaaaaaaaaaaaaaaaaacttactactatgttctgtttacattttgaggctatggggaaaatgaaaacccttcgtatttccattttccaattccttggactgtgaggaggtttcattattttgtggaaatcaaaccaaaataattttcattctttgctcagttttcctttactgcattctaggagccatttcatattctgtagttaaatttttaaaatatatatgccttgatgtccttttcttaggttataaatttctttctgtgtaaaactaaagctgggcacggtggctcatgcctgtaatcccagcattttgggaggccaaagcgggtggatcacctgaggccggaagtttgagaccagcctgaccaacatagagaaactctgtctctactaaaaatacaaaattagccaggcacggtggtgcatgcctgtggtcccagctactcaagaggcttaggcagaagaatcgcttgaacctgggaggcggaggctgcagtgagccaagattgcgccattgcactccagcctgggcaacaagacgaaactccgtctcaaaaaaaaaaaaaaaagctaaaatgtttccttgatgcccatttttgtttgctgataaattacattgtgtatatttaaggtatacaacatggtattatggtatggatagtaaaaaaaaaagtcattagagtttaacaaattaacacacccatcatctcacagttactttttttttttttccctctgttttggccagaacagctaaaatctcatttagcatgaatttcatatataataaaacattatttacaggctgggtgtggtggttcacactgtaatcccagcactttgggaggctgaggcaggcggatcatctgagatcaggagttcgagaccagcctggccaacatgatgaaaccccccaccatctccactaaaaatacaaaaatgagccaggcgtggtggtgcacgcctgtaatcccagctattgggaggctgaggcaagagaaaatcggttgaacccgggagacagaggttgcagtgagtcgagatcacgccattgtagtccggcctgggtgacaagagcgagactccgtacaaaacaaaaagcaaaaaacaaaacaaaattatttcctatcatcctcgtgttgtattaacttcttaatgcctaaactgcatctctgcttgaaattttaccaaaaaaacaaatatatacatcatgtgatgtttaaaataaatataatatttaataataattggtgcagtgagagaatttggctccatcttctctgataacaaatgttcagctcttacatctgagcaaaattataaccttaaaacttaaaacaactgctggtaagagtccccgcaggaacaccgcagtctctgtgagatggatattctgaccatggctagaatctgacattcaggttgatttcatatttttaaatcaatgatggaataaaacacgctctaatgtctgtatctagttttccattcaattccctgtcattaaggcagttagaaatagtgactcattcatacagcttcaaatgtagtataaaatcaggcagaaagatctccccttacacgcctccttttccatattttttttttttttgaggatgaagtcttgctctgtcacccaggctggggtgcagtggcaccatcttggctcactgcaacctccacctccgggttcaagctattctcccgcctcagcctcctgagtagctgggattacaggcccctgccaccatgactggctaatttttgtattttcagtaaagacgaggtttcaccatgttggctcaaactcctgagctcaagtgatccgcccacctcagcctcctaaagtgctgagattacaggcatgagacacggcgcctggcccctttcgataatttactaggtatttatgcacattaatatgtgacttccacatgcagcttctctattcctggtctacagaaagctgacagtgcatccagatgtggcccctaaacaatccctgctgcccaacagctctgataccacgggaccctcaccccatctccatccatgtctgggtgtgagcccttcccaggaccatgcccagtgcagcctcttcccaagttcatgtcactggatcatggtgagatggaatctaaataagatgagaggaactgaggaaaagcatggatgagcatgagcaaatgtgtcaggaaggacacttcagactcagagaagatttgcaactccgacgccctgtacttcacaaaggaaggagacagaatgacccaccaagaatatcacttcacttgagtaaagtatcactctacctgagtagccatcactgactccttttccttcctcttcttcctcttctgggtttctttctcagtcaatgtaattattcacacatcaaacctgaaagttaaaaaatctgttgtttaatgcttggaaacaacacattcctttctgtgtcacaaccatgcacacagggaagaactcagcctgtggagagacagcccactgcaccaggggggatgcaagaataataaattcctacacaaagaccaagtgaatctttcaccgttttcttcagcattagctcccctctgggagaagcccacacacaggctgcagcagtgtgtagctaggctggactgagctcccattcagggcacggacctatccctgatcaaaccccatgcagcgcacagccccccgtcacctctgtgggtcacaggctgagctctgccctcggaaatgggggacacagaggctggaagctcaatgctggatacaaatgagaatcaacttggggctgggagcggtggctcatgcctgtaatcccagcactttgggaggtcgaggcgggtggatacctgaggtcaggaattcgagaccagcctggccaacatggtgaaacaccctctctaccaaaaacacaaaaattagccaggcatggtggcacaccccttaaatcccagttacttgggaggctgaggcaggagaatcacttgaacctgggaggcggaggttgcagtgagccaagatcaagccactgcactccagcctgggcgacagagactctgtcaccaaaaaaaaaaaaaaaaaaaaaaaaaatcaacttgggtacctaaaacattacggaggctgggccccaccctaactactggaaggagaatctctataagggggaatgaaccatgtgttacaaatgccttggcactctagtgtgaagcgagggttgagtagtctcaaagggggcaagactaccacagccccagtctcccagctctgacctccccttggggccttgctgtcaccagtctgtagaaagtggaaggcaaagggccagaaagaaacacacagagcagaaaatatggacctgcctttattggcttttatttgcaatcctagaatcagacaacacctcattcttaaaatgaaaggagtgttctgtgagctaaggggaggaggttggcttcataagctgaaaggggctgaatggagcaaaatcaggaaactaaaagcatgttggttgtttcaaagttacttttctttgggttgccattttccccagatcctcaaaatgtaaaaacaacatagtagtaagttttgtttaaatgagtgggaagtctcatgtgatgctggtgggagagggcacctttgcagctcgggatgggggaaatcttgccagattacctgcaactgaggggccagagagttctaggcacagggacagcccaggtagacaccctcggctccaggaataggaaagaggcctgtgtggctggagcagagggagtgaggaggacacaggtaggaaatgaggtcagagaggtcccgaggcagcagatcaggtagggacgaggtcttcaaacatttttctcccacagctcacagcacttttagaaactatgcatttccctaccattttaggtaaatgtaacttttctttatcatttgaattaaaacccttctatataatgtcatatcttctctatttcaaatatatcctgacatgtaaagctagagccaggaagtatagggccaccgtcatctgagatgtgcaggagcgcaggggaatgtacttagggagtttaggaagtcactttagacacataaaggtggagacgtctcttagacggctgaacagacaacagaggagacaacaggacacagaattctagagttcaggggacaggcctgcaggggacatggagacgtgtaggtgagtaggtgggtgatatggatcagctctgtgtccctggcccaaatctcacactgaattgtaatccccaccgttactggtggggcctggtgggaggtggatggatcatgggggtggatttgtgatgaatggtttcgcaccaccccttggtgctgttctttatcacagtgagttctcacgacatctggttgtttagaagtgtgtagcgcctcccccctcactctctcttgctcctgctcccgccacgtgagacgcctgttcctacttcgcctgctaccatgtttggaatcttcctacaggctccccagaagcagatgttgccatgcttcctgtgcagcctgcagaactgtgagccaattaaacctgttttctttataaattactcggtctctggaattttgttgtagcaattccagaatggactaatacagtggggtttaaagccatgagatgagatgatgaggaaagacagtaggtgtggacagagataagaagaggttcaaggactaagccatgagtctttcccacattgagaaacattcgaagtccggacacagcagcagaggaaaatggtcagggaggtgacaagaaaattaaacagaaagctcctgacaggaaaagaaagactaaagcaggaaaagaaatacattggatttagaaatggggaggtcactggtgactctgaaaaataaagttatcagtggaatggtggatatgcaagtttgactggatgcattcaagagggaatgggaggcaagaagtgaagacggagagtataaataagatttcagcacagaagaggggtactcatacgggcagaaatgtagttagtagtatgttttgtttcaattagggcagagtggaaggaaacgataagctttagggtctgtgtgtgtgcatgcatttaatgggcaataccaccatcagtaaacaatgtttaaaataattccctagaggtaaaaatagacgttgcagttgttacactttataataggccaattttttttctctttttaacttatattttaagttcaggggtacacgtgcaggaggtgcagcctggttcacaggtaaacgggtcatgggggtttgttgtatacattatttcatcacctgggtttttgtgtgtgtgtgtgagacagagtctcgctctgtcgcctaggctggagtgcaatggcacgatctcggctcactgcaacctccgcctcccgggttcaagcaattctcctgcctcagcctcctgctgggactacaggcatgtgccaccacacctggctcattttgtatttttagaagagccggggtttcactgtattggtcaggctggttgcgaactccagacctcaggtgatccgcccgcctcggcctctcaaagtgctaggattacaggtgtgagccaccacgtctggccccatcacccgggtattaagcctaatgtctattagttatttttcctgatcctctccctcctcccaccctccaccctgaggtaggccccagtgtgtgttgttgccctctacgtatccatgttttctcatcatttacctcccacttatgagtgagaatacgcagtatttggttttctgtccctgtgttagtttgccaaggataatcgcctccagctccacccatgtcctggccaagcgcattattttgttcatttttatggaaaggccgttgttttgtacgagcctcccgcactaccagaccaagccagaatgaagtctctcatgctaaacgccacattagcaaactgacccttgaaataagtcacgtttaggaaaaaagaaaattccaaaaaagaaaacaagaacaggagttaaaaaatgaatttgtaataatttccctccttatcacgacatcgtaacaaggtttgagggaagcacatctcacatgagtgtgaaaacccaatcatcacatttattaactacaaaaggatcgaatttgttgtgattttgtccttcaacaataagaaactggtaaatgtgtttctctaagttcggtgagccatcctagcaaattaatcaaacctttggctggggtagtaggaatgccaatttggagtcagtaggtcagaagtataggtgacaacctactactttcgaaatggtagctgaagtgagccggggaggtcttgtgagactgagccctttacctgtgggcaacctgtgggagatgactctaactccaggtagacagtgccagaattaaattgaattctaaggcaatctagctgttgtctgctggagaattttttagtgtgtaggagaaaactccccaacactggccacagaagagttctgtgttaagtgtgagagtagaaaggaaaaaatttgttttttcctttacaccctgcaattactaggcctgtcattctccaaagagcattacccatcctctccccaaactgcctccccagcacctagtggaccctcttgcctggagaaaatatccctgttccacactgagtttaaagcattttgcctcgtagctccctgtgattgttgcagcagacagaggtggggggaaagtaatcaccactgtcctggcagcgagaaagtaacagctgtatcttccgaggacagtcccagttgaaatctttgtgctgcaggtcgttgtgatatcatattctctgattctttgaaaaatcttccctaagccaccatcctgccatagacccaccacagaaaaccctccctaacgaaagccttttgtcactagagtttgaggccctaacgttcccctcctaaactgagacaggtttacaaacttccttggggtccacacccttcccagatactccatagtgctccccatatcgtgctacgaaatcccacatgccccaacaactcataaactcctgctgacctaatacacacaaagatacctgaggactcaatgacccaagacactcgattccattcataatgaccccacccttgaacactggcaccaccatctactaaaacagatgtctccaatgatgcacataccccagtgagacccaacatcttccaaggaaactctccatattgacatttagatagtccaaaatgcatctataaccatcttaacttgccgcccaaaatactccaaaataacaaatgtagcccccaaagtgatggaccccacagaagtcactatggagagtgcctgctgtgctgcagctctgggttccatgccctcaggaccaatgcaccaccactccagctgcccactctccccgtgggctcagcttaggacttgctcctcaattcagctgacccttgaacaatacagctttggattgtgtggctcctttcaataaaattttcctcaataaacatcctgaagaatattttggagatttgcagtattttgttggctgtacaacaagaaggcctggacaatgagaagttgttccttaagtcaggaagggaatgccttttaaagttctttgatgttgggccgggcacagtggctcatgcctgtaatcctagcatgttgagaggccgaggcaggcagatctcttgaggccaggagttcaagatcagcctggccaacacagtgaaaccccatctctactaaaaacacaaaaaattagctgggcatggtgggacatgcctgtaatctcagctacttgtgaggctgaggcatgagactcgctagaacccaggaggcagatgttgtagtgagccgagatggcgcccctgcactccagtctaggcagcagagtaagactttgtctcaaaaaaaaaaaaagcgggggggggacagggggcaaaggacctgaacattttgcaaataagacatacaaatgccaggcacggtggctcacgcttgtaatcctagcactttgggaagccgaggcgggcagatcacctgtggtcaggagttcaagaccagcctgaccaacatggtgaaacccccgtctctactaaaatacaaaaattagccaggcatagtggcaggtgcctgtaatctcaggtgcttcggaggatgaggtcgcagtgagctgagatcacgccattgcactccagcctgggcaacaagagtgagactctgtctcaaaaaaaaacatacaaatgaccaacaggtatatgaaaaggtactcaagatcgctaatcatcagggatatacaaatcaaaaccaccataagctgtcacctcatacctcttaggaaggctattatcaaataggcaagagaggtgttagcaatgatatggagaaaaatgagcccttgtacactgctgctgggagtgcacatcagtacagccattatgaaaaacactatggatgttcttcaaaatattcaaaatagaacaacaatgcaatccagcaatctcatttctgggtataaatccaaaggcaatccaatcagtatgtttaagagacatctaggccaggtgtggtagttcatgcctataatcccagcactctgagaagctgagatgggaagatcgcttgagaccaggagttagagaccagcttggacaaaacagcgggaccatgtctctacttaaaaaaacaaaaaacaaaaaacttaggaacttctgccccctcatgatcactgcagtattattcacaacggccaagatatagaaacaaccaaagtgcccatccaggaatgaatatgtaaagaaaatgtgtgtgtatatatatttatgtatgtgtatatatatatatatatatatacagagtgtgtgtgtgtatatttatataatggaatattattcaaccataaaaaagaaaatcctgccgggcacagtggctcacgcctgtaatcccagcactttgggaggccgaggcgggtggatcatgaggtcaggagattgagaccatcctggctaacacagtgaaaccccgtctgtactaaaaaaaaaatacaaaaaattagccgggcgtggtggcgggtgcctatagtcccagctactcaagaggctgaggcaggagaatggtgtgaacccgggaggcggagcttgcagtgagccgagatcacaccactgcactctagcctgggcgacagagcgagcgagactctgtctcaaaaataaaaaataaaaataaaaataaataaaatcctgctatttccaacaacatggatgaatctggaggacattatgctgggcgatataagactgacacacaaagacaactactgtatgttctcacaagtagaatctaaaaaagtccaattcatagtaataaggcggaacagttgttaccacaggatgctgggtggggaaagtggagaaatgttggtcaaagggtacaaattctcagttataaaatgaagaagttctgaggaatctaatgtacttcgtggtgagtttaccgcactggacgctttaacagtttggaaagtttttgaaaaatctaataaattatggggtaaaagttaaaaaaaggcaatattgagaaattaatgacatcagctgattacaggatgacatcaaatcttatttcagaagttagtaattatagaagaaactgaataaactaaaatttaaatcaagcttccaaaataacaatgaattaactgtaaagcaactacaaggaaaaaagtaaatccattaacaaaacaaaaaaccaacactctcaactctccttcaaagacatacattgtaggcctgtagaggtggttcacacatgtaatcccagcaccttcaggggctgaggaggatggagtgcagctgagaggctgcagtgagccgatataattttaccgcactccagcctgggcgacagagaccctgtctcaaaaagagaaaaaacaaacaaaaaaccaaagatacatcttgtagtgacagtcagtcatttcttgcctatttctctcctcctccatcctctactccctccctggaaagaagagttacaaaatgactgaatcaagtcactgccctgtggctaaatagggattccaaatatcttttgatataaacaaatacaaaatgcacaagccttgtagaaaagagtggtaattttcatcctcatgagtacaatttaaagaaacaaattttaaattagagtataaagtcacaaatcaatacattaaaaccaccatccatatccaatcaactcacagctcatctgggtggggtcctcgcccactctcttcactactatgtgtttcccgctctcattctgcacgtcttttttccctttgctgtttttctcccctttctttattccctcttttatgtctattctgcccaatgcttcgaaatttatttcacctcttgttgctctttctccccaaactttcccattgtccccagccgccacgtattcctgcctcttttcccccatctgagctccctgtctgctctccctgttaaaatccctcttccctgttaaattcccttttccctgttacatctcctttgttcccactctctagcacccccaacttcctaggcttcctccttgctgtggttctccctctactctcctttgttacccactcccctctccttcagtcccagcaccacgtggctctgtcagccgcggctccgactcttaccttttccgccccccgcgtctgactgcagtgcctcctcctttgccgcccctctctattttgctgcccttcagctccctgaagctctcccttttccctaatttctttatgtgcttttctccccgtgctactttctccatgcgtcctcttgcactcttgctctctttgccagtacctaaattatcatccattttgccgtgtactcattcttttctccccagtttttctttctgtcccgtcgctccccctcttttcctctcctgatccctctcacccacacattcaggaggaaaggggaggaatacgatgcccacctcccggaagagcacattttccagtggagtaaaaatttgggaaggaacgacagtgggtgtcacaagacagactcgggtgacctcctgcaacgcggagtcaggaaaagcagtggctgtgaaggggcagcctggggaggggaaggacccggcgtgaggaggacactaggtggcgcgcggaggacactaggtggcgcgggggacggtgtctcaggacagggagggtctgcagaatcccaggacctgggagaagaagcggctccttcaggagctgggcagcgggcgctcccctccaggcgtcgacaagggcgaagctcgggggtctcgactggtgggaatccacctcgcgagggaggacttgacttcgcccggggccgaagcaggggtcaatgagagttttaagcaggaacacgacctgaatggggttatcgacatggttatctacatggcagaaaggcagggggcaaggaacagcctgagagagattttaaaccgacagggaagcaattctcggacttacgtggggagaagtgcctgttgcaggggcgaaggggctatgggtattttaaggtccgtagcgatccccagatcactggtacggagaagtgaggactgcaaagtgcacgtttaatccaggcagacggagcgaagtaatgtttaatccacgtagactgaaacacacacacagcgataaggcctttccctggcgcaatctgcttccgggagtgacggaaactgctagcggagagaaaaaactgggaggccagggggcggggcctgggcgagccgcgaccagcaaggggcgggtcggaaagaggggcctgactcggggagggaccctgagagggtggagccgggccggagcggcagtgggcgtggctaggtggggcgggacggagccgcggcggaggatggggcggggtttcatggggtaagcggggccgaaatagagcctgttatttactctggttcacaggcagcatgtctttggttttctgactacttcttgtcctgtgaagcagcgttgctgcctgcctattttaagttaatgtttcaaaatttaaggttaaagcttaaagttgtggtccacttatattagaaactaagatgatttcttaacaagttgaactaagtcaaaaccgatttttacaagcttggtggactccatccactcttgccgatgatgctgaagctactcaatagtcagggaactaggatctcgctggggatttgatgtggagccgtggctggatccaggaacccggaagacattatgccaagcgaaatatgctagacacagaaagacaaatactgcctgtgcttttacacgtgcaaagtacaaacgtcaaatttacagtaacagattagaagggtggttaccagggctgggggatgtatcctatgcctttatcaccattatattttggaagcagataacttctctggcctcacagattcacagctgggcagaaattttgcctcaggatgaatcacaccttgattctcacccatgtgtggttcagataatatttagggggtattctgccctaagagctgatacaggaatggattaagacttttgagagttgatactgaaatggattaagtcttttgagatgggccagcagttttggaggcccaggtgggcaggtcacttgagctcaagagttcaaaaccagcctggacagcatcgtgagacccccatctctacaagaaatacaaaaagtagccaggcttggtaatgcactcttgtagtcccagctacttgggaagctgaggtgtcagaattgcttgaggccagggatttgagatcatcctgggcaacatagccagacctctctacaaaaaattaaattatctggacatggtggcctgcacgtgtgggcccagcaactcggaagggtaaggaaggaggatcatttgagcccaggaggtgaaggctgcagtgagccatgagaagaggagatttggttgggtgcagtggctaacgcctataatccccacactttgggaggccaaggtagcagggagctaacttgcattcttctgttagctgaggcgtttgatgataaatgaaagcagaaagtttgtgacttatttacgttctttccacagaaaggccatatgtccttggccataaagaaaaagagacctacagcttatctgcttcctctatttttttttatatgttctggaccatgaagaaagatttatagcttatttgctttatctctttgctttctcctggtcctttcaggctgactccttttccccaattagggctccacagactctaccctcaaagggcatttttttctcaccctcctataaaatccctcccacaaataaaccaggatcctatttcccagcatgaaaagtttgttggaaaaaaaactgaggctgcatgggaccttctttctcttcttcaaaactacttcacctcttctctcttttgtctctctcttcctaactgccctgcacaattctaggtccccagtgaatccttgggttgacatgcaagggaagaacccatagggaaaggaaatctctggctttcagagataactttttggatatctggatgcattcataaccatccttgtgttaccagaaaggggtcctgatccagaacctgaaacttccattgcacaattataactgagaaaattattacagtgaaagagatctgacctaatcaactccatcttgcttttaacctccaagctgctcttgttcattcctgggcataggctgaactaactttggaaggaacttagtttatagtttgaaacaaagacattaacagccctttcccaaaacaaacccccttcctgcttggggactagactgcctttgtaagactaacaaattaggcacaaggtgagagatgatggtttaggagtcatgtagctggaggctacaagattctcacccttcccagattgttcctggggataacattactattataaaacctaagatcagtgcttgagatattttgcattccctgcacttgatggatcacctgacaccaacccagatccataaactggctcatctggtcttgtgaccccacccaggaactgactcagtgcaaaatgacagcttcagatctctatgatttcgtctcctacccaaccaatcagcactcccgactcactgacacctacctatcaaattatccttaaaaaccctgatccccgagttttcagggagactcatgtgagtaataaaaaaatttcaggttcctgtacagccagctccacatgaattaaactctctcttgcaattcccctgtcttgatgaatcagctctgtctaggcagcagggaaggagaacctgttgggcagttacaaccaaaagggagggttcttggatctcatgcaagaaagaattaggggtgagttcacactgtaaagtgaaagcaagtttactaagcaagtaaaggaacaaggcagggtgcagtggctcacgcctgtaatcccagcacattgagagaggctgaggtgggcagattgcttgaacccaggagttcaagagcaacctgggcaacattacaaaactctatctctacaaaaaatacaaaaattagccaagggtaatggtgtgcaccagtagtccaagctagttggaaggctgaggttggaaattgcttgagcctgggagaatttttttttttgaggcagtgtctggctccggtcacccaagcagtagtgcagtaatgccatctcggctcagactctaattcaacacggaatgttgagcttctgagcgtgatatagcggaagtgccttctcttccggtctctctggtcttggccgcagaagccagatgacgaagggaacgtcattgtttggaaagcgtcgcaataagacgcacacgttgtgttgccgccgtggctctaaggcctaccaccttcagaagtcgacctgtggcaaatgtggctacgctgccaagcgcaagagaaagtataactggagtgccaaggctaaaagacaaaataccaccggaactggtggaatgaggcacctaaaaattgtataccacagattcaggcatggattctatgaaggaacaatacttaaacccaagagggcagctgttgcagcatccagttcatcttaagaatgtctatgattagtcatgcaataaatgttctggttttaaaaaatacaaaaaaaaatactgaatgtttactcctgaaacttatgatgcctaggttgagaaagactcaattttcctcatgctaaatactttatacatgtcctttattcatgcatacataggacactttacacaatataattgttgaaagtgcttctgaaatactgttcaaattgtctataatatttttacacatgcactataaaaattaaatttatcagacaataaatattaaataatttaataaaattgcatttttcaaaggctctaacaatgcatatttgagttatcatattaaacattgtattctatgatttttcaactgtaatataattttttttgagatgggatcttgctctcttgcccaggctgcagtgtggtggtgcaatcacggctcatgcagcctccacctccccaggctcaagtgatcctctcacctcagtttttgtgtttttagtagagatggggttttataatgttgcctaggccggtctcaaacttctgggctcaatctgtccacctcagcctcccaaagtgctaggaatacaggcatgagccacagagcccagccaaaactacattttaaaaataattttttatcattacacactccactagaaaccatttaacccaatttatggacttacatttcttccattgaagaacttgaaggatccaaaaatcgaggtgacattctcagatttgtgtggcaaaaaaagaatagaaaaataacagatgcaaagaatgtgttccaccaatatgtggaggatcccttttattttaagttcagggaaagcattggaatgatacaagaaaataaactgaaattgtataatgtggaaacaagagctctgttgctaatatgcaagtttatcactgagattttaacaacacaacatgctaattataccttaaaatatgtttctcccagtctgggcaacatggcgaaaccccatctctacaaaaaaatccaaaaattagctaggtatgctggtgtgcacctgtagtcccagctacttgggaggctgagagaagaggatcacctgagtccaggaggtggaggttgcagtgagctgagatcgcaccactgcactccagcctgggtgactgagcgagaccctgtctcgaaatattacaatatgtgacagcgcagcttccatcagaaataatttgttcctcttttgcccacacaaaatattcacctccacttcctctaacatttttttttaaaaaaaaaagcccaaacataactttcagttgcaagcaaggatctcatgacagtctcatgacacttctgttcactgagagcccaatagagtcctcgtcactcacgacatttcatggtggaacagaaaaataaaacctgaattaaccctcacattcagaaaagggaaacaaagaaggtactacccagtaggtccatagcaaatgtgcaattttgctgagaagatgagttagggcctggttccaggaggtcaggaatgaataacagtacttttcatggctacagttctcctgagaataggtttccagtccactatattttgtcgttcttaacttcacccgatgacatccctcatgcagtatcagaaagtatgccctccttctgcagtaagcatctttccccagctacttcttttccacttcaatgtaccatcccaaagactattataagtctaaatttaattttgtttttataaaatactatggactgatagaagtctcaaaagtataacattatgaaaagtataacaaaagatagcattttatctgatgccatttcaaaatagagacattttcaaagctaaacccatgactttagctatacccacgagttttaggaacccttccttagtttcagaattttattccagtgcttttgaacttcttgggccacagtctagtttctatttactacacttgccatttcatccactctcaaaaaacaatttcacaagagttaccttaatcaactggcaggttatttcaaagaacgttagggctatggccttgacttggactttgttataattttaacttgctgttgcccctcaaaccacttctcaaatgtgagttttatcagttgcagatgagctactgctgcagacttaaacattgcttgaaaatcagctaactcatttttgaagaatttacaaaatattgtgtcaagtgcagttgaaagccatatggcacattagcaccttctgctttctttttgtttgttttgttttgttttgagatgaagtctcactctgtcacccaggctggagtgcagtggcatgatctcagctcactgcaacctccacctcttggtttcaagcaattctctgcctcagcttcctgaatagctgggattgcaggtgcctgccaccacgcctggctaatttttttgtatttttagtagagacagggtttcaccatcttggccaggttggtattgaactcctgacctcgtgattcacccacctcagactcccaaagtgctgggattacaggcgtgagccaccacacccggcccaagcaccttctgctttcttgatctctatactggcaggtggtatttccaagaatgatgccccctctccaggaaacgtttgcacatgtctggagacatttttgattgtcacaattggtggtgttgctggtatctggtggtaaggaacagtgatatgtgtttcctccaaatctcatgttgaaatatgacccaaattgttgaaggtgggccgagtgaaaggtgcttgggtaatggggttgggtctcttctgaatggcttggtgctttctccatgataatgagtgagttcttagtcttagtacactcaagacctacctgtttaaaaaagactagtggcctggctggtggctgaagcccgtaatcccagcacactgggaggctgaggcaggtggatcacaagatcaggagttcaagaccagcctggccaagatggtgaactctgtctctattaaaaatacaaaaagtagccgggcatggtggcgggcacctgtaatcccagctactcaggaggctgagacagagaattgcttgaacctaggaggccgaggttgcagtgaactgacattgtgccactgcactccagcctgggcaacagagagagactctgtctcaaaaaaaaaaaaaagaatccttcttctagtacacagatgcattttaaaggggtcttctctactgctttttctctcaaaatcaatttcagtttggcctgtctgttcacatttacatgaggatccaaattgttgttttcataggtaaatgagtgactgagtatcctcagcttcgaacagaaagagcattttgctccttgcagctgataggcacccctaggtgaccgggggcctcatgggagtatctgggaagttgacccaccgtgatgtgtagtggctctacagagaacccccacaaaattagttttaaaaagactaatccaggaggtgcatatgggtgctagtaacttgtgctttgagccctcctggaggtgcttagacctccggaggagaaactgagacacataggagggcggcagtgactcagtggtaacacactgcggagtctcttttgcaagcagcacatactttgacctactccacaaaaccctaggccacatctccttttctccttttaaggaaacaaacaaacaaaaaaagtgggaaccaaataatctaagaacgaggagaaaaccagaagaatgacgcccctttcaggcactcctttggttttatggcacctcttcttgcaagtgtttgtgtgacatgaacttatatggtctttttgtgcagaagtacatgaaggaaaattcagagcccaaaggtcagcctgcaactgtaaagttcccaagttctctctctgctttcttttctgcctgcttgaagtccactgctacttttctaatgagataaaatccactgtttgcaatttctttttgaaaaccaatgagtttctactaatacctcatgattaaagttctgaagtaaaagctacatgatctttggttatatgagaatgtatgtgtgtgctaatgtgtttgtatacgtattttgttgtgttttggacacaaggcgctaaattggcttaaagagtcctcgtaaattaaataataagccaaaatgtttctcaagttcacatgacttaagtaaaatctttaataagttagctttaaaagtattggtaaaataggccaggcatggtggctcatgcctgtaatcccagcactttgggaggctgaggcaggtggatcacctgaggtcaggagttcaagaccagcctggtcaacatggtgaaaccccatctctactaaaactacaaaaattagccaggcatggtgttgggcacctgtaaccccagctactcgggaggctgaggtgggagaatctcttgaacccagggggcagaggttgtggtgagccaagatcacactactgcactccagcctgggcaaaagggcaagactctgtttcaaaaaaaaaaaaaaaaaagtattggtaaaataatattagaaatgtcttaagaattgccagcatacatttttgtttgcatttattgatcaagcaatttcatagttatccctgccaaatactattgaggcaggaaaatagcagagggaattggagtttggataaagggtggaatgagtaggagcagaagaaaggtgaagaggtgggtgcccaagcctgtcatgaatggtctgtgtaagtcattaataagaggatttatgaaaaaaaaaaaaccttttatatttcaagttgtatataaattaaacagaaattataatggtctttctagtgactgggttttgatccttaaaaaaaccacttatagactaaataattggatcaaaatacaaaattttcctaaggtattgctttactcttaatatattattacaagacactataatttttttacacaaagttcaacttttattgtgtcttgctgttttcagctttctctcctcttttaaaaggcctgaaataataactctatccttcaactaattttcagctcctgtaagtttttctcttttagtttctaactgttgtggcctcatgccaacatcaacaaaatgttttatcctagaggtctaaaggaaatgtttcctttcaatgtaatattccccataggaaacagcagttgcactggaggaggtcttttcttttgcctttagataactggcctaataaacagatcttacactttatcaaaataattcctatgtcattattactaagtttggtttggttagaaaaaaactgaaattaaaaaatttttttttaattaaggttatcacatccatgtattttctgtatgtgcttttttttttttttaaagagagtctcactttgtcactcaggctggagtgcagtggcatcatcttggctcactgcaaccttgtctccaggttcaagggattcttgtgcctcagcctcccgagtagctgggattacaggcacacaccaccatgcccggataatttttttgtatttttagtaaagatgaggtttcgccatgttagccagcctggtgtcaaactcctcacctcaagtgatctgccaccttggcctgccaaagtgctgggattacaggtgtgagccaccatgcctggcctgtatgtgcttttaaagtccttgtgtcactaagttacagagctttgacgtctgggtctaaaaaggacaccaagtcctgctaaatcttaaacactgacagcagttaaagcctcattttcagacctaatagaagatgccaatcaaaataaactgtgttcttgagacgcaggacaagaaagtaaaactattcaactcctcaaggcccaggggctattacagaagaggtgggcacatgaaattgcaagagcttacctggagagataaaataagttcagtttctctataaattaaccattgatgtcaaaggcacactgatgcaagaccagcatatgagcctctttgtcagattaacaaggttttcttggagcattgacccactccataataaagattacaatggtagtaaaaaggcttctggaaatcatatcttatgggcaagatgattaaaattttagattgtttacaaaattttgaataacaaatttaattagcctcatgctctctttattagggattattgtttgagaaattaagtgtcctctctcaaaaaataatggtttgcacctttttatgaaatctttgtggtatcactttggttaaatgaaggacttattttacaatggcctctgatcctattttgtgatgtcaagcactttaaagtttgtcaaatattttttgtcaaactttaaattgggtcctcattaatcttttcatattagttccctgaagtccgaaagaggcacattaagtttatttggtataaaaatcaaacagaaagcattgtcaaataggaaatggtgtttggctttctttgggctgtatttgtataaatatgttattggcatgtgttccaaaattatgagaaactcttgtaactgtgatatgacttcatgtatgttattaataattgtaattattatgtaaaattattgtatgccacagaagtaaccaaaagttctagtcaattgtgctttaatagtggctgtcctaagacttttttgtcatttatggacaattgttgtcttattttgatcctcttcacaaggtgatttggccgggtgcagtggctcatgcctgtaatcctagcactctgagaggcttaggtgagcagatcacttgaggtaaggagttcaagaccagcctggccaacatggtgacaccccctccctactactagaaatacaaaaattagctgggcttggtggcatgtgtctgtaacccagctattcaggaggctgaggcaggagaattgcttgaacccaagaggcagaggttgcagtgagccaaaatcatgccactgcactccagccggggccacaagagcaaaactccatctcaaaaaaaaaaaaaaaaaggctgggcgtggtggctcacacttgtaatcccagcactttgggaggccgaggtgggtggatcacgaggtcagcagttcaagaccagcctgaccaacagggtgaaacctcgtctctactaaaaatacaaaaattagctgggcatggaggtggcacacgcctgtaatcccagctactcaggaggctgaggcaaaagaatcacttgaacccaggagggagaggttgcagtgagccgagataatgccactgcactccagtctgagcgacagagcgagactccatcccaaaaaaaaaaaaaaaaaaaaaaaaattgttgctgatcctttgttttgttttcagagacaagaaaacttttcttatgagctgttggcagctgttaacaactgaggaaagtatactcctgtaaacaaattttggtgcatatttgtctctctgcttttgaattatctggaatttggaaactatttgtgagtattcataacttatggcaatacagttatttgcataagtgcaataagatttttttttagctggtcatggtggctcaagcctgtaatcccagcacgttgggaggctgacataggcggatcatttgagcccaggagttcaagtccagcctggccaacatggaaaatccccatctctacaaaaaatatgaaaatcagccaggtgtggtggtgcatgcatataatcccagctatttgggaggctgaggcacaagaattgcttgaacctgggaagtggatgttgcagtgagccaagatcacaccattacactccagcctggttaatagagtgaaaccctgtcttggaaaaaaaaaaaaagttttcttttgcaacagaataccatcagagaaaatggctattttaccaaggctttgactgaaatggtgtgctttcctttaaggaatcaaacttgattcatagagcccattaaagccccttggaaaactagtctcataccctgcctacagcatccctatacagggtttctgacctgtgttaagtaaagaatgtccctttctgataggcccaggaactccaagttatcttgggacctcaagaggagaggaatttacccaactcataggtatttggtgatacatggcaatggctgggcttggcttttaaaaagtcttacctgatattccttttgtggaacaaacttccatcaaagccaatataaagagtctgtgtgaaaaataatgattcttgctgcacttatacgtataaacaggccaagaataataaagcaaatcagtcataccatgattggtctttagtaaaaacaggaaactggagtgagaaaaattatgtttcaaaaactacagtacatctgttgttagactctagtctcgcctattgtttttcaatttttattattttctaaagtttggactgaattctaacttttctgggctacacatctccaaaataatgtttttaattttttccctccttcttccccgatttttctaatttcaaatcactaaaaactaagctgtgctttcttaaagccctgagaaccgaagctagacaacttaaatgtcagaagaagatagtaacagcctatttacatatataaggcactttcatacctggctactgatgtatgaacttcagagtaatatggcccatgtcaattttccgaaattgttatttttctgtttgttgtttctctccctttctccccccattttctctccgcaggacatgagacttcacaacgtgcaaaatgtgagctttcctaataatatgggacctccctctctaggaataaactgtcctagccatgagggatcagaggaaaactaagaacagagactcatgttcttctaaaatgatttctctgaaaaatttttaaaaagaaaaaggcattagatgggagagttaaaatcatcattaaaaaaaaccaggggtgggggaatgtgagaagtcctgggaggtggaggttgcagtgagctgagataacgccactgcacactagcctggaggaaagaccaaagactctctcaaaacaaaacaaaaacctcaaattgaatacaatattttataaactgaattggccttttccacatatgttctggctcctttgacatacataacgtcctgagttttaacaaattttgtcttgtagttattgtgtagtatgtaatattccaggccaatcttggagaagcaggcttggttatccctagtatgatttcaaggatgtgtagtctgttgtgagaactggttttaaattttaccacactgattacatttgtaaggtttctctccagtatgaatttggtaaagactgaaaacacactactgcttaaagtccctttcatgttcagcacattcataggatttttctcctatataaattctctcactccaaaagcatgaacatttgattttttttttcttttttttgagacagagtctcgctctgtcgcccagtctggaggcacgatcttggctcactgcaagctccacctcctggattcatgccattctcctgcctcagcctcccaagtagctgggactacaagcgcccaccacctcgcccagctaatttttcgtatttttagtagagacggggtttcaccatgttagccaggatggtctcgatctcctgacctcatgatccacctgcctcggcctcccaaagtgctgggattacaggcgtgagacaccgcacctggccgaacatttgattttttaaaaagtcttactacatttgttacatttgtaaggtagctcttcagtatgaatactctggtttccattttgatgttcaggtaaaagccttaccacacatattacgtttgtgtggttcctctcaaagttgtatattttgatgtctcgtgagttccgatgcctggggaaagtctctggcacatacgtgtagatttcctatcagtataaactcccttctgtccagtagggattgaactctggtaaaggttttgccacactcttttcatttgtaaagcatctctgcactatgaattatctatagatccacaagttttgatctttgaatagaattcttgccacacatactgcatttcagtaatttctctccaatatgtatattctttttttttttttttttttttttggagacaaagtcttgctctgtcgctcaggctggagtgcagtggtgtgattttggctcactgcaacctccacctcccgggtttaggcaattctcctccctcagcctccaaagtagctgggactatgggcacatgccaccatacctggctaattttttgtattttagtagagacggggtttcattctgttgcccaggctggtgtcaaactcctgagctcaggcaatctgcccacctcagcctcccaaagtgctaggattacaagtgtgagccaccacacccggccttctagtatgtacattcttatgccaagtgagtagtgaacaataccttaaaacttagctacatttactgcatgtgtaaatgtattgggccatatttgaattgctataaagaactatccgaggctgggtaatttataaagaagtttaattgactcacagttctgcaggctttacaggaaacatggtgctggcatctgctcaccttccgaggaagcctcaggaatgttaaaatcatggtggaaggaaaaaggggagtgggcatgtcacatggcaagaataggagcaagagagaggaaagttccatacacttttttttttttttttttttttttctggagacagggtctcgctgtcacccaggctggagtgcactggcacgatcttggctcactgcaacctctgtctcctgggttcaagtgatcctcatgcttcagcctcctgagtagctgggattacaggcatgcatcaccatgcctggctaatgtttatattttagtagagacaactgttcaccacgttgaccagcctggttttgaacacctggccacaagtgatctgcctgctccaacctccctaaatgctgggattacaggcatgacccaccatgcctaacgtgccatacacttttaaccaacaagatctcagccaggcgcagtggctcacacctataatcccagcactttgggaggccgaggcaggcagatcactaggtcaagaaattgagaccatcctggccaacatggtgaaactccatgtctactaaaaatacaaaaattagccaggcatggtggtgtgcacctgtagtcccagctactcagggagactgaggcaggagaatcacttgaacctgggaggcagaggttgcagtgagcctagatcacgccactgcattccagcctggcgacagagagagactccgtctcaaaaaagcaaaacaaacaaaaaaacaagatctcaccagaactcactatcccaagaagagcaaaaagcgggtggtgctaaaccattcttgagaaatccacccctgtgatccaatcatctcccaccaggccccacctccaataaaggggattaaaattccacatgagatttcagacggaagtgacaaatatacaagctatatcaataagtatgaattatttgaacccagaagttaggagaacatctaaaggcttttccacattgaattttgttttaagactctctgcagtatgttttgtctgatgtttagtgaggcctgagcgactaatgaaagatttgccacactcattacatttataaggtttttctccagaatgaatcatttggtgtttgttgaggcaagaaaaccgcccaaaggccttgccacattcaatacatttgtatggcttctctccagtgtgatttctttgatggtacaccagctttgacctttcaataaaagctttaccacattcattacatttgtaaggtttgtccccagtatgcattttctgatgattaaccagaattgaacgcactctaaaggctttgccacactcattacacacgtaaggtttctctccagtatgaatactccgatgacgtgctagtgttgattgatgacgaaagaccttgccacattcattacatttgtaaggtttctctccagtgtgaattctccgatgccttgcaaggttcgaagtggaattaaagacctggccacattcaatacatttgtatggcatctctccagtatgccttctctgatggtacgtcaggcctgttatatgactaaaagttctaccacaatggctacatttgtgtggtttctccccagtaggatttctgtgatatcttgcaagttttgaactttggataaatgcccctccaaactcattacaattgtaaggtttctctccagtatgaattatcagatgtttagtgaggcttgaacgctgagtataggctttgccacaatcattacatttgtaaggtttctctccggtatgaattttccgatgacgtgctaggcatgagtagtaactgaaaaccttgccgcattcgttacattgaaacggcttctctccagtatgaattctcttatgatttgaaaggtttccactgtcattgaagaccttgccacacacattacatttgtaaggtttctgcccagtatgaattcttagatgacgtgctaggcatgagtagttcctgaagactgtgccacattcattacattggaaaggtttctctcccgtatgtattctcttatgaattgaaaggtttccactgtaattgaagaccttgccacacacattacatttgtaaggttgctccccagtatgaattcttaaatgtcttacaaggcatgaattttcactaaagacctttccacattcaccgcattggtaacgtttctctctggtatgaattatcttatgtcgagtgagtaatgagccctgtttaaaggctttaccacatttatcacatttgtaaggtttctctccagtatgaattctccgatgccccacaagatgtgaagtctgactgaagaccttgccacattcattgcatttgtaaggtttctctccagtatgacttctctggtgccttgcaagttgtgaacgttgactgaagaccttgtcgcatacatcacatgtatatggtttctctcctgtatggattatctgatgtgtagtgaggctggagctccgtttaaaggttttgccacactcatcacatttgtaaggtttgtttccactatgaactgtctgatgagttgccaggttggaactttgactaaaggactttccacatatgttgcatttgtatggtttctctccagtgtggattctctggtgatttacaagattagaattctgcctgaagaccttgccacatatatcacattgatatggtttctctcctgtatggattatctgatgtgtagtgaggcatgagccttgtttgaaggttttcccacactcattacatttgtaaggtttctctccagtgtgaattctctgatgtattgcaaggttataactttgactaaaggacttgccacattcattacatttgtacggtttctctccagtgtgacttctccggtgatttacaagatctgaattttgtctgaagatcttgccacatacaccacattgatatggcttcccccttgtatggactatctgatgtatagttagtagtgagccccgatgaaaggctttgccacattcattgcatttgtaaggtttctctgtagtatgtaccatctgatggttaataagacttgaagacactctaaaggctttgccacaccctttacacatataaggtttttccctaatgtgtgttttctcaagttgggtgggtaatgacagctgcaaaaactcattctcatattttttagaaatgttggtttggacactaggaagaattctttgaagtggtgaaactagggaactgttattaactgtcttctcagattggttacactcataaattttcccttcagtttgaaatttctgcagttcagtcagacgtgactgaaagcttaatgtaagctgattttcaatacatttgttttctacatcctcttgactatgttgacctcttttaccattaagattgtttttataggtcattggcacttctttataatttatttcaccatctttccattgaaactcaaggtcctgtagatttttctggatttcccttaagtaaaaattttcaacatcataacattcatgtctttccagcgtcactgtttggcatttttctcctgtattactgttccctattggtggtaattccttggtcatacatttaggaaggatacctacaaaatataatgaacatgggagttttttcgttggtttttttttttgagacagagtcttgctctgttgcccaggctggagtggagtggcacaatctcagctcactgtgacctccacctcctgggttcgagctattcttctgcctcagcctcctgagtagctgggactacaggcacacatcaccacacctggctaatttttatatttttagtagagacagggtttccccatattggccaggctggtctcgaactcctgacctcgtgatccgcccacctcggccccacaaagtgctgggattacaggtgtgagccactgcgcctggccgaacatagattttaaaaataactagtattatttgtttttttttaaataactactattcataaatattttatattgaaaacatactacactaaaagtaacgtttatactagacagttaccaaactttaccacaatgatcttctatttttacaaataaaaaaggagtagaattcttcagtaaagaaagagtaatcacatgtaattcaaattaattttaaggaaacctagtttcaaacattcaatgactgaaagactcatgttgtgcaaacatatattagcactaaaacaagtatttttccaccatgcccccaaatcatacatcaactggcagcaaacatatggctctctcagaagagaaaatagttatatacatatatatttacttcatatttattgtgcatgaataaatgtcaaattacagctaaatatcaacaagttcaactaattaatgttctatataaatggcaagctagaattataaatcaaaaatagtactgggaaaatgagaaagaattttttgaagttataacactaagttatttttctgaatacttattatataagtattaaacctgttctaaaactacctatttctggccgggcgcagtggctcacacctgtaatcccagcactttgggaggctgaggtgggtggatcatgaggtcaggagttcgagactagcctggccaacatgatgaaaccccgtctctactaaaaatacaaaaattagccaggcatggtggtgtgcacctgtaatcccagctacttgggatgctgaggtaggagaattgcttgaacccaggaggcagaggttgtagtgagctgagatcgcgccacagcactccagtctgggtgacagagcaagactctgtctcggaaaaacaaacaaacaaacaaaaaactatctatttccataaaaaatagacatttgcaacactaacaagcagtgcaagtcagctatattgacttatgtctgccaaaactcgtatgttggggtcctaatcctcaatgtaatattacttggaggtgtgaactttgggaggcaattaggtcaccatggtagatagaatttcaggaacggaataggaatttgagtagatgtgaaaaagcttttgctttttgcacggcaatccttctgccatgtgaggacacagaaagagttagtcatgatacaccaggaaaatggcccacaccaagaaccaaggtgactggctctgacatgtggactgctcatcacccagatctgtgaaaagtgacttcctgttgtttaaacgaccctatctatggtatctgctatacctaaccacattaagttaaagctaatatgccatctcattataaacatgaaataatgttgatataccttattaaacaaagaaatttgtgagtctttactataaaacatgcaatattctaagctagcaaacagcactaacttgttttaaaaaatcttaagataaattatcactattttacaaataaggacagtaagactgcccacaggatttatgtatctacacccaaattacgaagaaagtaagacatgaacctgggtttccgggatcaaacatgtttttaaataaaactggccaaacagtcagtgcagataactggtcactccaaataccaagagtgtggaaagaaatacttcaagagccaatgtgtgttgccaaaacattattcagtcacccttcatgaataacagtatctgagccatcatcccctgcacatattgacatagacagtgttctcagaaagttgtcaagtgaatgagttacactgagtgtaacatggaaggtgagggagtactgcaataatgggagtgtaaaattaatatgctagtaagtaactgggtagtccatctggaccaaagtaatatgtttggaagaggcagggaggaggaagggcaagaggggagggcaaagagttataagcatggggcagcagcgtttgtgcttgcagagctgtgggtatataattgcccaaagaatagttaaaatcctgactttggaagaaaagagagatactaatttagaagtagcgtggtgactcacgcctgtaatcctagcacttcgggaggccaaggcgggcagactgccgagctcaggagtttgagaccagcctgggcaacatggtgaaactccgtcactactaaaatacaaaaaattagccgggagtggtggtgtgagcctgtagtcccagctactcaggaggctgaggtaggagaattgcttgaactcagaaggcggaggttgcagtgagttgggttcacgccactgcactccagcctgggagacaaagctagactctgtctccattaaaaaaaaaaaaaaaaaaaagtaccattatactgactaatacttaaatatgggaattctactaagggcacaggacaacaagggaagacattcaaaaaggggatagtgtgatgatatgggaaatgaaaggccagatgcagcattatgaagctttttatttgtgagtcaacaaggcttcagtctcagtcaaataatggaagggctcccaagaaagacaacagagaaaatacaaaaatacacgagggcagatcttaacttctagagcaaaattatccttacccaggaagaccaggttcctgtagttctccaacatcacatcccagtacaaagctttctgcacagggtccagggatttccactcctcctgagagaattctatggctacatccctgaatgtcaaaggtccctgaaatgaaaaacacatttcaacatgagcaatgggagagctcttatctatacataaaatgagaagaggagagaactgtcacatcaatttgattgtgtgttttcacatatccatgcaaggcatctgtgagaaggttatgtgtccctaatttaagtttgttttaaaattcaatagaagattatgatatcccgtaaatcagtgtaggcttctcatttttgtgtacaatgcaagaaatatacaaagaaatgaacacgtggttatctgtataagtattagatattatgttcaatatatcaactgagtgtccagatgagctagtatacaagtggtgtcttggagatgacaatgtccatagaagctttaaagaaaggtcagaaactaaaaactgtgatgaccacagcaacagcaatgactgaagttttggaacactccccatgtgctgggcattactccaaatgctttacatgttctaattcaaataataacataatagatagagagatagagagatttgttcccatgttactaggagacaactatgtcacagaaaacgctaaaaagtcacctaggtcaacaacctgaaaatggcagagcaggcatctaaatccagatgtctgagaatcagtcttgaatcaaaagaaacaaatggttaaattatggttacggtatgtcttagtctctctgtgctgctgtaccaagtaaaacagactgggtaatttatgaacaatagaaatgtatttctcatgattctgctggctggggaaatccaagatcaaggtgccagcaggactgatgtctggtgagagatgatcctcgcttccaagatggtcttgttgctgcacaggggacgaatgctgttgtccccacatggcagaagggacagaaagggcaaaaagcagtgaactccgtagaataagccttttgatatctcattgacgagaacaccatacccactgataaaggcagacttctcatgatccaatctcctcctaaaggccacgactcataacatttaaagattaggcactggggattaagtttcaacatgaattgtggaggagaaaaaaaaaaaaaactcagactgtaacattccacccctggcccccaaaattgatatacttctcacaaacaaaatacattctatcctaatggctcccaaagctttatttctacaaccaattcaaaagcctatagtctagagttgtatctaactataatctaaatcagatatgggtgagactcaaacatgcatttcatccaaaggcaaactgctttctagttgtgaacctatgaaagcaaacgagttatgtgcttccaaaatacaatggtggggcagacacaggttaaatatttcaattccaaaagggagaaacaggaaagaaggggtagctgttcccatgtaaggctgaaacccaacagggcatacacattaaacactaaggcttgacaataatctttgactccgtgtcccaccttctagacatcctggagtagaggttgggtcccaacatcctggggatccctgccctagtggttttgttgggatcaccccacatggaagttctcacagtgcctgcagctctcccgagctggaatcacataccggtgactctacagttttggggtctcaaaggtggccctgctcccagggctttactggaccttatcctaacagggactctctgaagttggccccacctccacagctagactgagcattgccttagtggggacttccagggacagcctcactcctatggcatttttatgcctaggctccaaggatctctgaggcattctttgaaatctagatggaagtaaccgtgagtccacatctcatgccctctgcacacttttagttagcactgtgttgatgttgccaaggtttacagtttgtgtgttgtaaccgacctcaatccctggtggactgaacaaagcgggtgaacgcgggaataaaagaaaaagacaagagagtatatttggaagaaggggccagggggcatcttgcctctagtggacaagggccctgagctttttcagccctccaaatttattaggtaaaagagataaccagaagtgggggtgattgttggtaactcagtcggccgtttggatcacagcaggcttgcaagactgcatccttccaacaataagctctagatttcccagtagataacttcaaggagcccggcgccagggagtgacggccctcagcaaaccttctggcggcaggcgcagtcgtgagtttgcccacatcctgcattcatggtaaacagtttgctgtttgatcatatagcctccagtggaatgctaagttgatcacgatccctttggcctttttagctcccaacagtgtgtgccctctggagtggtggctggtccgcacctggccccacttcagtcataggtggggtagccaaggacctctgctctgaaatacagagatcacagacctgaggtatcagagttccgaggtccgaagggcaccctgggccactcccttgaaactattctgccctcaaggccctggcactctggacctacaatgggcacagcagtctcaaagatctctaaaatgcctttgggatgattctctgattgtctcaataatcaggtcctggcttacttctatccatactaatctccttgtcagaggccacttggctacacccctcttggttttctctcctaaatacacttttaattctttacatggccaggctgagaattttccaaatctttacactgggctttgaaaacaaactgtttttaactcatttctctcttctcctgttttactataaacaggtcagagaagccatgcagcaacctgaacaatttgctttgagagtgtttctaacaaacatcttagttcatcactcttaaattctgctttccacagcccgggtgcggtggctcacgcctgtaatcccagcactttgggaggccgaggtgggcggatcacaaggtcaagagatcgaaaccatcctggccaacatggtgaaaccccgtctctactgaaaattcaagatgagatttgggtggagacacaaccaaagcctatcaactggtttctgtcttgcctgaatataatcactgaaaggaacaggatgaaaggttaggggccactgagaaaaaagaagattgacataaaccagtgtgtgcagtaacacggaaagacactaggtaagatctagtaccataggtgactgcagcaccagagtcttcaatagcgcagacaggtaacaggggagcttctgagtagaaaccagcaaacctcttcaattaggagatgacaagcaaaggctcagagaggacacaatccccagtcagaaaattataattgtgtgtgtgttgttgttgttttagatggatcgttctactgaactccagcctgggcaatagagtgaaaccctgccacaaaagaaggaaaagaaaaagaaggaaggaaggaagggagggagggagggaagaacaagaaagaaggaaagaaaaagtgagaaagaaagagagtaatggccgggtgcagtggctcacgacctgtaatcccagcactttggggagccaaggagggcaaatcacctgaggtcaggagtttgagaccagcatggctaacatggtgaaatcccgtttctactaaaaatataaaaaattagccaggcttggtggtgcgtgcttgtaatcccagctactcaggaggttaaggtaggagaattgcttgaacccaggaggcagaggttgcagtgagctgagatcgcaccatcgcactccagcccgggcaacaggagtgaaactctgtctcaaaaaaaaaaaagagaaagaaagagaaaggagggagggagagagagagagagagaaaaggaaggaaggaaggaaggaaggaaggaaagaaagagaaagaaaaagagagaaagaaagaaagactagagctaaaaataaaataactgagttgaaatagtcactagatgagttcaacagctgacttaatcagacagaagaaggaatcagtgaactcaaaggggattttgacagggagagaaacaaaaactataaaaaacagagaaaaatgaagagagcatgaggggctcatggcaaacaatcaagcaccaagaacatatgtattctggaagtccaataaataatgtgaatatatataacattacttaactgtaagtaaacaaacaagctttactgaaaggcataatataatcaaaggctgggttcaatggctcatgcctgtaatcccagcacttctggaggctaaggcaagcggatgacttgagttcaggagtttgagaccagcttggtcaacatggtgaaaccccctctctctgaaaaatacaaaaaaattagctgggtatggtggtgagtgccaatagtcccagctgctcaggaagctgtggcaggaggatcccttaaacctgggaggcggaggttgcagttggcccagatcatgccactgcactccagcctgggcaacagagccagattccatcaccaaaagaaagatgcatgcaaagaaaacgtaagcaagaaaaccttagatctaaaagaaacatagtattttatgatcactctgtgagccaggccttccagaaaaagataaaggaaaacatttatttatttttgcttttgtggtatgccatcctaaaagaggcactcactctttaaactgcccaacctggaggaaacttcagacatctgtggtaaagatagcatgcatacaggcagccacggtgacattctttgtaacagcaaaaaacagtaaaagacccatacgtcttcatttaggcactgctccaaagaggatgcaaaacaaactattagtgtttattaacataaaaatatgtacacttcaaaaacttgcaaaacaaaacttcacagcagaacattcactgaagaattgttttctgaaatctcataatgacgtgtaaatgcaacttgacacctctcactgactcttgccacagaacttgcaacagtagctccccacagaaacatgagggatggtggatgatgtgatagggaaaggaacctgggttcccccaggttgggcacttgaaagagtgatcgcttcctctaggatggtgcatttcctgctttgctagatctggcaagattctccactaccctgagctgcaaagcagccctctcccaccaacatcacacgagatttctcactcatttgaacaaaacctactactatgtttcttttagatgttgaagatctggggaaaatgataactctttgcatttccattttccatttcattaatttgtagaaatcaaaataaaataatcttcattctttgctcaatttttttttactgcattctagcagccatttcatattctgtagttaaattttcagaatatatatgccttaatgtcctttttttatttttatttttatttttggagacagagtctagctctgtcacccaggctggagtgcaatggtgcaatctcagctcactgcaacctctgcctcctgggttcaagggattctcctacctcagcctcccgagtagctggaactacaggcatgcgccaccacgccaggctaatttttgtatttttagtagaggtggggtttcactatgttggccaggctggtctctaactcctgacctggtgatccgcctgcctcagccttcaaaagtgctgggattgcaggcatgagccactgcgcctggccaatgtccttttttaagattataaatttttttttagcataaaactgaaatgtttccttgatgccccatgttttatgtttgcttataaattttatggtatatataaggtatacaacatgatattacagtatagatagtaaaaaaagtcactatggtttaacaaattaacatatccatcatctcagaggtacctttttttttgacaggaacagctaaaatctaacatagcatgaatttcatatataataaaatattattttcctatcatcttcatgttgtaccaacttcttttttttttttttttgagacggagtctcgctctgtcgcccaggctggagtgcagtggcacgatctcggctcactgcaagctccacctcctgggttcatgccattctcctgcttcagcctcccaagtagctgggactacaggcccccgccaccacgcccagctaatttttttttttttattttttagtagagacggggtttcaccttgttagccaggatggtctcgatctcctgacctcgtgatccgcccgcctcggcctcccaaagtgctgggattacaggcgtgagccaccgcgcccggcctgtaccaacttcttaatgcctcaactgcatctctgcttggacttttactgcaaacaaatatattatgtgatgtttaaaataaaagaaatatgatgttcagtaataactggtggaatgagagaatttggctccatcttctctaataacaaaggagttctgctcctacatctgagcaaaattataacctttttacataaaacaactgcgaagagtcccagcatgaacaccgcagtctctgtgggacggatacagtgacaatggctaaaagaatctgacattcaggttgattttatattttaaaatcaatgatgggccaggcacggtgggtcacacctgtaatccctgcattttgggaggccgaggcgggaggatcacctgaggttgggagttctagaccagcctgaccaacatggtgaaaccccatctctactaaaaatacaaaaatcagccgggcgtggtggcgcatgcctgtaatcccagctactcaggaggctgagacatgagaatcacttgaaccagggaggtggaggttgcagtgagccgagatcacaccattgccctccagcctgggcaacaagaacgaaactccgtctcaaaaaaaaaaaaaaaaaaaaaaaaatcaatgataaaataaacaccctctatcactgacgtgtgtatctaattgtccattccattcccagtcattaagattttgaagttagaaacagtgattaattcatacaccttcaaatgtagtataaaattaggcagaaaagatctcccctcataggtctcttttccagaatttatgaggtatcgtgcacattaatatgtgacttccgtgtgcagcttctctacttctggtctacagagagctgactgcatcctgattttgcctctaaacaatctctgctgccaacagctctgacattgtggggcccataccccgtctccatccgtgtctgggtgtgagtctctcccaggaccatgcccagtggagcctcttcccaagttaatgtcactgggtcgcagtgagatagaagctaaatgagatgagagaaactgagggaaggcatgggtgaatggcagcaaacgtgtcaggcaggatgcttcagactcagaggagattcgcaactccaatgtgtcgcatttcaaaaaggaaggagacagaatgatccactaagaatatcattttacctgtgtaagagccatccctgactccttttctttcctcttcttcctcttctgggcttctctctcagtcaatataattaattctttacaagtcaaatctgaaagtgaaaaatctgttgtttaatgcttggaaacaacacattcctttctgcgctacaaccatgcccacagggaagacctcagcatgtggagagacagcccactgcaccagggggatgcaaggataataaattcctaaacaaagaccaagtgtcctggcatggtggctcacgcctgtaatcccagcaccttaggaggcagaggcgggcagatcaactgaagtcaggagtttgagagcatcctggccaacacagtgaaaccctgtctctactaaaaatacaaaaattagccgggtgtggtggcatgcacctgtagtcccagctactcaggaggctgaggcaggagaattgcttgaacctgggaggcagaggttgcagtgagccgagatcatgccactgtgctccagcctgggtgacacagcaagactccatctcaaataaataaatcaatcaataaaaataaaaaagaaaatgtatgatgtgtctgtatacatatctttatgtgtacgtgtatttatatagatatatatagtatgcgtacatatgtataatggacttattcaaccatcaaaaagaagaaaatcctgctatttgcaacaacatggatgaaccatgcaatctccgcctcccaggttcaagcgattctcctgctatttgcaacaacatggatgaacctggaagacattacgctaggtgaaataagacagacactaaaagacaattactgtatgacctcacaagcagaattttaaagtatccaattcataggaacagggtagaacagttgttgccaggggctggtggtggggagaatggaaaaatgttggccaaagcgtataaactttcagttataaaatgaagaagttcaggggaatctaacgtacaccgtggtgtctatactgtattggacactttaacagtttggaaagtttttgaaaaatttaatgagttatagggtgaaagtttaaaaaaatgacaatacttaacatttagaaatgaatgacgtcagctgattataggatgccaccaaatcttatttcagaagtcagtaattatttatagaaaggcagatattgaataaactaacacttatctcaagcttccaaaataacgatgaattaagtggaactacaaagaaaaaagtaggccaggcgcagtagctcacacctgtaatcccagtactttaggaggccgaggccggcagatcacctgaggttgggagttcaagaccagcctgaccaacatggagaaactctgtctctactaaaaatacaaaatcagccaggcgtggtggcacatgcctgtaatcccaggtactcgtgaggctgaggcaagagaatcacttgaacctgggaggcggagattgcagtgagccgagatggcaccattgcactccagcctgggcaacatgagcgaaactccgtcccaaaaaaagaaaaaagcaaatccattaccaaaaaaaaataagactctgaatactcatacaaagatatacctcgtaggcctggcgtggtggctcccgtctgtaatcccagcactctgaggcagaaagactgcttgagcccaggaggttgaggctgcagtgagcggagatcatggcactgtactctagtctgacagagcaagaccctgtctcaaaaaagaaaaaaaaaaaaaaaagacataccttgtagtgacagtgacagtcatttatcgccccatttctcagttactctatcctctaccccatcccagggaagaaaagagttaccacgaatgacttaatttaaatgctctctggctaaacagaaattccaaatatcttttgatacaaataaatacaaaatgcacaagccttacagaaaagagtggtaattttcatcctcacgagtacaatttaaagaaatgaattttaaattagagtataaagtcacaaattagaatattacaaccaccatccatatccaatcaactcatcgctcatctggatggggtcctctcccactttcttcactattgtgtgtgtccctctctcattctgcacctttcctccccttttctgtttttctcctctttatgtctgttctgcccgatgctctgcaacttacttcacctctcgtagctctttctccccaatctttctgattgtccccaatctccacgtatttccgcctctttttccccatctgagctccctctctgctctccttgttaaaattccctcttacctgttacacctcctttgttcccactctctagcacccccaactccctaggcttcctccctgctgtggttctccctctactctgcttgtcacccactgccctctctccctctctttcagtcccagcaccacgtagctctgtcggctgcggctccaactctttcaccttctccccactgtctgtctgcagtgcctcctcctttgccgccccactctattttgctgcctttcatctctctgaaggtccccctttttttctaaatttctctgtgtgctttcctccccctgcttctttctccattcgttctctttcactcttgctgtctctttgcaaatccctaaattatcatccattttgccgtgtatttatgggtctccctcattctcttctattcggtctttccttttgctccgtcgctccccttcttttcctctcctgatccctctcacccacacattcagtaagaaaggggaggaataggatgcccacctcccggaaaagcatattttccagtggagtaaaatttgggaaggaagaacactgggtgtcacaagactcaggtgacctcccccaagggggggatcgagaaaagcagtggctgtgaaggggaagcctggggagcgaaaggacccggcgtgaggaggacacaaggtggcagggggtacggtgtctcaggacagggagggtctgcagaatcccaggacctgggaggagaagcgactccttcaggagccggacggcgggcgctcccctccaggggctgacgacggagaagctccggggtcgcaacgggcgggaatccacctcccgagtgaggactcgacttggcgcagggccgaagcagaggtcagtaagggttttaagcaggaacacgacctgagtggggttgtctacatggtcctaaggcagaaaggcagggagcaaggaacagcctcagagagatttttaaaccgaaagggaagcaattatcagacttacttggggcgaaggggctgttgctggtattttaaggtccgtagcgatccccaggaaacgggtatggacaagggaagactgccaagtgcacgttcgattcaggcagacggggcgaagcaaatgtttagtccaggtagacggaaactgacgcgcagcgctgtgatcttttccccgcgcgatctgcttccgggtgtgcaggaagctacacgccctgagaaaaaagactgagagacctggggcgggagaggggcctgggcggggtgcgacccgcaagggaaagggcagaaagactggccagatttgggaaccctgaaagggtggggcaaggctgatgcggtagtgggcggggccaggtgggctaagcgggacgggcggtgtgggcgggacctgtttggtgggcggggcctgttattcgctctgccttccacccagcaagtctttgttctcccgatttaggagtatttgtgactatttcttgtcctgtgaagcagcgttgcttcctgcctattttaagttaatgttttagactttaaggtcaaagcttaaagttgtggtccacttctgttggaaactaagatgttttcttcttgtcaagttgaactgatttaagtcaaaatcgatttttgcgagcctggtggactccatcgggtcttgccagtgaggctgaagccagttaaggctgaagttactcagtagtcagggaactaggatctccgtgaagatctgatgtgcagccgtggctggatccaggaaccctgaagacattatgctaagcgaaatgtgctagacacagaaagacaaatcctgcatgtgcttacttacatgtgcaatctacaaacatcaaaattacagtaacagagtagaagggtggtttccagggctgacggtctatcctgtgcctgtcccaccattgtattttggaagcaaatagcttctttggcttcacagtttcacagctggacagaaattttgcctcaggatgaaccacactttgagtctcacccatatgtgattcagataatatttgggtaatatttgggccttagagtttgatactgaaatggattaagacttttgaaatgggccaggagcagtggctctggcctgtaatcccagctctttgggaggccaaggtggaaggattgcttgagctcaagaattcaagaccaacctggggcaacatagtaagacccttgtctctacaaaaaatacaaaaattagccaggcatggtggctcacgcctatagtcacagctatttgggaggctgaggtgggaggatctcttgagcccaggggatcaaggctgcaatgagttgtctttgcaccactgaactgctgccagggcaacagagtgagactctgtctcaaaaaataataataataagacttttgagatgttaggatgggggtgaagggatcttgcatgtgagaaggacatgaattttgggagtccagagtacagaatgttatgagctgaatcacgtccctaaaaaatcattgttggccaagcgcggtggctcatgcctataatcccagcactttgggaggccgcggcgggcggatcacaaggtcatgagatcgagaccatcctggttaacacggtgaaaccctgtctctactaaaaatgcaaaaaattagccgggcgtggtggcgggtgcgtgtggtcccagctgctccggaggcagaggcaggagaatggcgtgaacccaggaggcggagcttgcagtgagccgagatccagccactgcactccagcctgggcggcaaagcgagactctgtctcaaaaaataaataaataaataaaataaaataaatcattgtctttaagttctaacacccagtacctcagaatatgactgtattttgaaatagggcatttagaggctattaagttaaactaagcttgttagaatgggctctgatgcaatctgactgatgttttgataagaggaaatttggctggaagcagtgcttcatgcctgtaatcccagcactttgggaggtcaaggtggatggatcacttgagctcagaagtttgagaccagcctggccaacatggtgaaaccccatctctactgaaaatacaaaaattagccaggtgtggtggcgcatgcctttagtgccagctactcgggaggctgaggcaggagaattgcttgaatctgggaggcagagcttgcagtgagccgagatcgcgccactgcactccagcctgggtgacagggtgagactctgtctcttaaaaaaaaaaaaagaaaaattagccgggtgtggtgtcacgcacctgtaatctcagctacttgggaggctgaggcaggagaatcgcttgaacccgggaggcggaggttgcagtgagccaagatcgtgccactgccctccaacctaggctcaaaaaaaacagtgtgtggcacctccccattctctgtcttcctcctgtctgggcatgtgaagtacttgcctccccttcaccttctgccataattgtaagttttctgaggcctctccagaagccaagcagatgccagcatcatgcttcctgtacagcctgcagagccatgagccaattaaacctcttttctttataaattacccaatctcaggtatttctttatagcaatgtgagaacaaactaatacactggcactacaggcatgtgccaccacacctgactaattttcaaattttttgtagagatagggtttcacgttgttgtccatgctggtcttgaactcctgggctcaagtgagcctcctgccttggccgcccaaactgtaaagtagataaaatttaaaaaatgtatatttttccaaggccgggggctgtggctcacacctgtaatcccagcactttgggagactgacgggggctgatcacgaggtcaggagatcgagaccatcctggctaacatggtgaaaccccgtctctactaaaaatacaaaaaattagccaggcgtggtggcacgcacctgtagacccagctacttgggaggctgaggcaggggaatcgcttgaacctgggaggtggaggttgcagtgagccgagatcgcgccactgcactccagcctggggacagagtgatactccgtcttaaaaaaaaaaatttccttcagatgagtaggtaattaagtaagaaagaaatataaatcttaaaaaagggctgggcatggtggctcacgcctgtaatcccagcactctgggaggctgaggtgggtagatcacctgaggtcaggagttcaagaccagactgtccaacatggtgaaacccagtgtctaccaaaaatacaaaaatcagcccggcatggtggtgggcgcctgtaatcccatctactcagactgaggcaggagaatctcttgaacccaggacaggaaggttgcagtgagctgagatggcaccattgcactccagcctgggcgacagagcaatacttcgtctcaataaataaatactatttttccttcctcgagaaactcaaagaaggctgatctgtatgtgatccgcaattgacttttcagtcagtggtcctttgctgtgacccacaggagtgtgacattctatggatggattcttctccctgagaccagaacttcatcttttgcatatgatcagaggcttttagaggctctgcattacttttcggatcaacaccattacacaagtttagcctagagacagctgacgtgggaaggtatcttatgaacaaatactgttgcactcggctctcttgcagggatcttgctgccccttaataatttcctccagggccactgaaagacgctagaatttttcctagatctgtctcccacacatacatagattggaatttttggataaaagctctgtttaggccgagctcgatggctcatgcctgtaatcccagcagtttgggaggccgaggcaggcggatcccttgaggtcaggagttcaagaccagcctggccaacatggtgaaactccgtctctactaaataaaaaaatacaaaaattagccaggcgtggtggtgcatacctgtaatcccagctactcgggaggctgaggcaggagattctcctgaacccaggaggcagaggtggcagtgagccaagattgtgccactgcactccagcttgggtgacagagtgagactctgtatcagaaaaaaaaacaacaacaacaaaaaacctctgtgtatcactctgagccccgcccaacctgtatctctagaaggatgatattctctgaggagacagatcttaggtgtctctttgcactgatgttattgatttagcaaggaaaacaaataggcaaatatcagtttatgctggtgatgggatctagtgatctcttacttgacttgggtctctgatttactcaaataatgataaaaattgattctcctctagatggcagaaaaacaagaggagctccagcccacacaggaggtagaaagtagaatctatgccacgtggagtccagtttgagttcagccataggcactgagtgtcctcccacaaagaaatggctctctattatttgaagggcactcttgttggcactgctgcctggagctactggacactgagagcgtgcatctcagaccagagttctaggcctgcatcacagagcgacggaacagcacaaaggttctttagtgcggagaagagataaaaaggagaaggtgagccctgaccctcctcccaccatccagtctagccaaccccagcaaatgtctgaaaccaacccaatcccttcactgttctttttcctttttcttttgagacaggggtttactctgttgcccaggctagaatgctgtggcacgcccaggctagagtgctgtggcacgatcacggctcactgcagcctcaacacctccaggctcaagtgatcctcccaccttagcctgccaagtagctgggactctgggactacaggtgcacaacaccacgcccagctaatttttgattttttatagagacggtcttactatgtttcccaggctggtttcaaactccagggctcaagctatctagccacctcagcctcgaaaagtgctgggatttataggtgtgaaccaccatgcccagcccactgttctttttttaaactctaaaaaatattatatcttttagctttttctctttcctttcttttttagacagggtcttgctctgtcacccaggctggagtgcagtggtatgatcaccacagcattgacatcccggcctcaggcgatcctcccacttcagcctcccagtagttgggactacaggcatgcgccgccacacctgttgggagccgaaaaggccaaagggatcatgaccaactcagcgttccgctggagactatattatcaaactgcaaactgtttatcatgaatgcaggatgtgggcacactcacactgccctgccaccaaaaggtttgctgagggcctcactccctggcaccgggctccttgaagttatctattgagaaatctagcacctattgttcgaagaatgcagtcttgcaagcctgctgtcaatcaaactgctgaccgacaaccccccaccgctcttgctatctcttttgcctaataaatacggagggctgtgtaggaggactgtgtaaagctcagggtccttgtccactagaggcaagtgccccctgaccccttcttccaaatatactctcttgtctttgtcttttattccctcgttcaccctcctttgttcagtccccctaggtccgtgccggctacacacacctagttaattttttttttttcctgtggagatgaggttccactatgttgcctaggctggtctcaaacacctgggttcaagggatccttccgcctctgtttcctaaactgctgggattataggcgtgagccacttgcatgtggtcccttcactcttctctaagcctccatctattccatttccatcccctcatcatatcaaacataccctttgggccgggcacggtggctcacacctgtaatcccagtactttgggaggctgaagatgggcagatcacttgaggtcaggagttcgagaccatcctgggcaacatggtgaaaccccatctctactaaaaatacaaaaattagctgggtgtggtggtgcacacctgtagtcccagctactcaggagactgaggcaggagaatcacttgaacctgggagacagaggttgcagtgagctgagattgccccactgcactccacttgggcaacagagcaagactctgtcttaaataaataaataaataaatataaaaaacatataccttggtaaaactttatttattccacatgtaactgagatctcatatgagtctagcatcactcttagagagctagactttaacctcattaatctatcatcctgaaagtccatcgttttcccacaaatgtttgctaattcccagggatttatactctcaggatctactatgtcctctattcaagctttcttgtaaaacttgtctttgctttaaattaacacagcttttctttctagtagcccccaaaaaaccacattcacagaaaagcctcacttagccatttggcctttttttattcatttttattttgagacagagtctcactctgtcacccaggctgtggtgcaggggtggatcatagctcactatagcctcaaactcctgggctcaagggatcctcctaccttagccttctgagtaggtaggattacagatgtatgccaccaggcccagtgtcaggcctctgagcccaagcctgcatgtatacatccagatggcctgaagcaactgaagaatcacaaaagaagtaaaaatggctagctcctgccttaactgatgacattaccttgcgaaactccttctcctggctcagaagctccccgactgagcgtcttgtgacccccgcccctgcccacaagagaacaaccccctttgactgtaattttccactacctacccaaatcctataagactgccccaccccatctcccttctctgactctcttttcggactcagcccacctgtacccatgtgattaaacatctttacttattattatttttttttccccgagatggagtcttgctctgtcacctaggctggagagcagtggcgtgatctcggctcactgcaacctccgcctcccgggttcaagccattctcctgcttcagcctcccgagtagctgggattacaggtacccgccatcacgtccggctaattttttgtattttgtatttaggggtttcaccatgttagccaggatggtctcgatcttctgaccttgtgatccacccgctttggcctcccaaagtgctgggattacaggcgtgagccactacgcccagcaaaaagctttattgctcacacaaagcctgttggtggtctcttcacacggacgcccttgacacccagctagtttttttgttttttgttttgttttgtttttggagacagggtctcgctctgtcacccaggctggattacaatggtgggatcatagctcaacctcctgggctcaagtgacactcctgtctcagcctcctgagtagctgggaacacaggcacacaccaccatgcctggctaatttttgaatttttttgtggagacgaagtctcaccatgttgcccaggctgttctcaaaccccagggtcaagtgatcctcctgccttggcctctcaaaatgttgggattacaggcatgagccaccatattgggccttttttttaagagagagatggggtcttactatgttgtccaggttggcctcaaacttctggccacaagtgatcctcctgccttggactctcaaacagttgggattacaggtgtgagccaccgtgcccaaccctggcctttattaaagacactgcatggctgacacacaaggaaagagatgccatccagctccatgggaaacagtttcgtaaccttattgtaattatttttcttccagtcccttctgggctgctcttgcattgggggcttgaagctcttcccttctacctgtgcagccccttaccctgctgtcctgctcttctctgtcctggttcctctctccctcaacattttatgttctccatctatataggtcaattttctcccaaatctattctccaatttgtacacttaaactcattttgatttggagaatgtgagtcttccctttaacataattgtgtcccttatgagagcagttagttttaaatggcaacattattttgttgctttaagttttttttttttttttcctaggaatcttagctctgcagggttctttgagcttttaaaaactactttatggccgggcacggtggctcatgcctgtaatcccagcacttcgggaggccgaggcgggtggatcacgaggtcaggagatcgagaccatcctagctaacatggtgaaaccccgtctctactaaaaatacaaaaaattagccaggtgtggtggtgggcgcctgtagtcccagctactccagaggctgaggtaggagaatggtgtgaacccgggaggcagagcttgcagtgagctgagatcatgccactgcactccagcctgagcgacagagcgagactccgtctcaaaaaaaaaaaaaaaatgctttattaggctaggtctggtggctcatgcctgtaataccagcattttgggaggcctaggtggctggatcacctgacgttgggagttcgagaccagcctgaccaacacagtgaaaccccatctctactaaaaatacaaaatcagccagacgtggtggcacatgcctgtaatcccagctacttggcaggagaattgcttgaacccatgaggtggaggttgtagtgagctgagatcatgcattgctctccagcctgggcaacaagagcaaaactccacctcaaaagagaaagacagaaagaaagaaaaactactttattgaggtatgattgacatataaaaaactgtagatatttaatgtatacaacttcacgtgtttggaaataagtatacatccttgaaactattatcacaactaatgccataaacttatcaattgcctccaaaaattcccttccagttcatttcttcactccgctttggttttgtttgtccttttgtgataacataagatcttatataagacctaccctttcagcaaagttttaaatgtacaacgccgtatttgttaatcatgtgccctatgttgtacggtaggcctccagaacttgtttatcttgcaggactgaaactttgtacactttcctttttgtttttgtttttttgctttttgcttttttaatttccccatgaaattaaaaaaaaaaagtttctcttcatgagaaactttgcacactttgaccaacaccttttcatttcctcccacctctcagcctcttgcaaccactattctgctttctgcttctgtgtgtttgactattttggattccacatataaatgaggtcatacggccgggcgcggtggctcacgctcctaatccaagcactttgggaggccgaggcaggcagatcacaagctcaggggttcaaaaccagcctggccaacatagtgaaacccagtctctactaaaaataaaaaaacaaaattagccgggcatgggggtgggcgcctgtagtcccagctactcaggagggcaggagaatggcgtgaacccagaaagcagagcttgcagtgagctgagatcgtgccactgcactccagcctgggtgacagagcgacactctgtctcaaaaaaaaaaaacatacgagatcatatgttatttgtctttctgtgtctgtcttattttactttgcataatgtcccttaggttcgtccaagtcatcacaaatgacaagatttccgtttttttcctttttatttgagacgcagtttcactctgtcgcccaggctggagcgtagtggtgcgatcttggtccactgcaacttcgacctcctgggttcaagcaactcttctgcctcagcctcccgagtagctgggattacaggtgtgcaccaccatgcccagctaatttttttgtatttttttagtagagatgcggtttcaccatgctggccaggctgctctcgaactcctgacctcatgttctgcccgccttggcctcccaatgtgcttggattacaggcgtgagccactgtgcctggcctgttttttttgagacggagtttcactattgtcacccaggctggagtgcaatgtccctatctcggctcactgcaacctccaactcctgggttcaagcgattctcctccctcagtctgccgagtagctgggattagaggcacccaccaacatgcccggctagttttttgtatttttagtagagacgggggtttcactatgttggccaggctggttttgaactcctgacctcaggtgatccaccagcctcggcctcccaaagtgctgggattacgggcgtgagccaccacgcctggcctagatttccatttttttaaaggctgaatagtgtgtgtgtgtgtgtgtgtgtgtgtttatccatttatcagtgaacatttaggttttttccacatcttggttattgtggcaataaacataggagtgcagatctctctccaagatattgatttcattcctttggatatataccatgaagggggattgctgaatcacctggtagttctatttttaattttttgaggaacctccataatgttttctaccaatttacattcccaccaatggtgtacaagggttccctttctccacatccttgccaatactatttcccgttaatattattttgtttttgagacagtctcgctctgtcgcccaggctggagtgtagtggcacaatctcgactcactgcaacctccacctccagggtttaagcgattctcctgcctcagcctcctgagtagctgggactacaggcatgagccaccatgcccggctgttttcttttgtttttttgaggcagagtcttgctctgtcatacaggctggagtgcagcggcacattcatggctcactgtagcctcacctcaatctcctggaccgaaccaatcctcccacctcagcctcccaagtacagtagctgggaccgcaggcagatgccactatacccagcttatttatttatttatgtttgagatggagttctgctcttgttgcccaggctggagtgcagtggcgtgatctcggctcactgcaacctccgcctcccgggttcaagcgattcttctgcctcagccttcctgagtagctgggattacaggcatgtgcccccacacctggctaattttgtatttttagtatagacggggtttttccatgttggtcaggctcgtctcgaacgcccaacctcagatgatccgccacctcggcctcccaaagtgctgggattacaggagtgagccaccgcgcccggctatttctatattttgagacggagtcccgctctattgcccaggctggtgtgcagtgatgtgtgatctcagctcactgcgacctccacctcctgggttcaagcgattctcctgcctcagcttcctgagtagctgggattacaggagcccaccaccatgcctggctaatttttgtatttttagtggtgcacatgcctgtaatcccagctactcgggaggctgaggcacaagaatcccttaatcccaggagatggaggctgcagtgagtcgagattgtgccactgcactccagcctgggcaacagagagactctgtctcaaaaataaaaataaaaaaaaaaaaaaataaaaaattcaaggttgcttgaagaagatataagactccggtgtcaggtccaacagactttattactgacaacacagcaaagaagcaaaaacttgatactcacgtcaatccccttgcacttcaagtccaacaggactgatgagaaagggtctggacagatgctttgcatacagtgagtgtgtaatgcagtgagtgtgtgccagaatgaagaatcctgagcttataaagcaatcttttaagagggccacaggaagacctccccaacctttgcttctgacatatgcatcattatatatattttttacagtggttaggcaacaaatctgcctctggccatggggactcgctgttgctatcttcctaaaccgtttgctatacaaacattcttggccgggcgctgtggctcatgcctgtaatcccagcactttgggaggctgaggctggtggatcacctgagatcaggagttcgaaaccagcctggccaacatggtaaaacccccgtctctactaaaaatacaaaaattagctgggcatggtggcggacgcctgtaatcctagctccttgggaggctgaggcaggagaattgcttgaacccaggaggtggaggttgcagtgagccgagattgtgccattgcactccagcctgggcgacaagagcgaaactccgtctcaaacaaacaaacaaacgaaaaaacacaaacaggccgggcgcggtggctcatgcctgtaatcccagcacattgggaggccgagatgggcagatcatgaggtcaggagtttgagaccagcctggccagcatggtgaaactccgtctctactaaaaaaatacaaaaaattagccaggcatggtggcacgtgcctgtaatcccagctattcgggaagctcgggcaggagaattgcttgaactcgggagggggaggttgcagtgggccaagattgagccactgcactccagcctggatgacagagcaagactccatctcaaaaaacaaacaaacaaaaaaaacccaaaaacattcttgataagatagtctggaacaaaagctttaaaaaatgtgaagatatgtgagatgccctgggagaattatctaccaacatagtgtacatttccctttaatacacgggaatagtcaatcttctgaacaaaaagatcccctggctgggcacggtggctcatgcctgtcatctcagcactttgggaggctgagacaggcagattgcttgagtccgggagtttgagaccatcctgggtagggtagagagaactactcaggctgagtgagcttctagacaggacaaataaaaagagcattgcaagtagggttttacaggggggtcacttgacaaggcaaataatgacaatttcctgggactgggactttgaagggactccagccctgttctcctcctgccaatggttgccaggttgctgttcctctctgacggagactgctggctttcaagtctaccgtggatcagtggagggacaatgaaatagggcaagttaaaaaaaaacccacaaagcttgctattcttcccaagattcagctgttttccttgaaagcgatgaatatcatccctagattgctgcaaactcttagttaatttccaaagattaaaaaaaaaaaactgtaaccccagcattttggaaggccgaggcaagcggatcacgaagtcaagagatcgaaaccatcctggccaacatggtgaaaccccgtctctactaaaaatacaaaaattagctgggcatggtggcacgtgcctgtagtcacagctactcgggaggctgaggcaggagaatcacttgaacccaggaggtggagactgcagtgagctgagattgcaccactgcactccagcctggacgacagagtgagactccatctcaaaaaaaaaaaaaaaaaaatgatgctgaaattgcttttttttttgagatggagttttgctcttgtcaccgaggctggagtgcaatggtgccatcttggctcactgcaacctccgcctcccagattgaactgattttcctgtctcaacctctccaacagctgtattttcagtagtaaggccttgggaaggtcattaggtcatgatggtggagccctcatgaatgggattagtgtccttataagaattctgtcagacacagtggctcacacctgtaagcccatgactttgggagatcaaggagggaggatcagttggggccaggagtttgagaccctgtctccacaaaaaagtaaaagtaaataattagctaggcatggcggcgaatgcctgtagtcccagctactcaggaggctgaggtgggaggattgcttgagcccaggagtttgaggccgcagtgagctgtggtcatgccactgcactccagcctgggtgacatagtgagaccctatggcaggatctcaccattttttcctccaaaaaaaaaaaattgttaaaaaaaattccagtattgtgcagtagctggatgtttcaaattttaaaaagaagaaaataaaaaataaaataagagtcttgatagaacttgcttctcccttccaccatgtgagaaggacacagctagatggcaccatctacgaatcagaaagtggaccctcaccagacgctaaattgctggtgccttgatctcagacttcctggcctcccaaactgtgagaaataagtttctgttgtttataagctacccagtttatggtattttgttacagcagcctgaactaagacacgttgcaacttccactttccattcaacatatatcgtccccatttctcttactccatacatacagatctaagtggtttttatgaaagttctttaataatccatagttggtatgtccgatattttatgcaataatctatcaaatagtggactttcctattttacatatgtagaaactgaggatcagggccgggcacagtggctcacacctgtaatcccagcactttgggaggccaaggcggatcacttgagcccaggagttcgagaccagcctaggcaacatagtgagacccccgtctgtacatttttaaaattaaaaaaaaaaaaggccaggtgtgatggctcacgcctgtaatcccagcactttgggaggccaaggcgcacggatcacctgaggtcaggagtttgagaccagcctgaccaacatggagaaaccccatgtctactgataatacaaaaattagctgggcatggtggcgcatgcctgtaatcacagctactggggaagttgaggcacgagaatcgcttgaacctgggaggcagaggttgcggtgagctgagatcgcgccattgcactccagcctgggcaacaagagtgaagctccatctcaaaaaaaaaaaaggaaactgaggattaggaaagcccaagacccaacatcaggaatgtctcctagtcccagaatctcttgcatttgtacaccccaccccactatgaactcaggcatagtaaaataatccaaaatcccccatcaaatattttatatatatacatatatatgtgtgtgtatatatatatatatacacatatatatgtgtgtgtgtgtgtatgtatatatatatatatatatatatatatatatatatatatatatacatacacatatatatgtatttctattttattttaattttttttgagacagggtcttggctgttgcccaggctagagtgtagtggtgtgatcatggctcactgcagcctcgatctcttgggctcaagtgatcctcttgcctctgcctcctgagtactacagggatatacctgatgtactacaggcatgtgccaccactcccggctaaactttctttcttttttgcagtgacaggggtcttgctatgttacccaggctggtctttacctcctggcttcaagcaatccttcctccttggactctcaaagtgttcagattacaagcatgagccaccaccacacctggattgtatcattatattaaagctgagttttagtcaagcaagcctttggagtcagactgcccaggttcaaattccagcacccgatgagtggggtggctcctgtttgtaaccccagcactttgggaagccaaggcaggtggatcatttgaacccaggagtttgagacgagcctgggcaacacagtgagaccccaggggtctctacaaaaattaaaaaattacccgggcatggtcacacatgcctttagtcttagctaccgggcattgggggggccgaggtgagaggaccacttgagcctgggagatcaagactgcactgagcacagaacagattgcgtccctacactcccagcctaggcaacaaggcaagaccctgtctcaaacaaacaaacaaattccagcaccactattaccatctatgagaacttggacaaattcctaaagttctctatgcctcggtttcctcatccattaaattaggatgatgctgctactttacatatatcatagagttattgtcagggttaaatgaattaatttactgaatacactttactgtagctattatcactggcattgatctgtataggtattgatttgtataggtattgatctgtataggtattgatctgtataggtattgatctgtataggtattgatttgtataggtatttgttaaatacttattaaagtttgcagttttgttttgcattttggaatccataatttgtttttattttgtttctgagatttataatgcctcatttaagcctctgaaaattcctaggccctaagcacttcaaaggccaccagcccaacatcccaagcagcctgacaccaagacaggcacgcatagctaaaaagatccctagcctcagagaccttggggctgagaggagtcctgggaatagggagggctgggactgaaatattcaaccccatccccacttttatgagcagcagtttcctaactgcagtgggtaagggtatttgaaatagatgctgggccgggcacggtggctcacacctgtaatcccagcgctctgggaagtccaagtgggcggatcacctgaggtcaggagttcgagaccaaagacagccaacacggtgaaaccccgtctctactaaaaatacaaaattagccgggcgtggtggctcatgcctgtaaattccagctactccggaggctgaggcagaagaatcgcttgaacccgagaggtggaggttgcagtgagcagagattgagccactgcacttcagccggggcaacaagagcgaaactccgcctcaaaaaaaaggccgggtgcggtggctcacacctgtaatcccagcactttgggaagccaaggcaggcagatcaccctgaggtcaggagtttgagaccagcctggcccaaagtggtgaaaccccgtctctactaaaaatacaaaaattaaccgggcgttgtggtaggcgcctgtaatcccaggtactctggaggctgagacaggataattgtttgaacccaggagacagaggctgtagtatgccgagatcgggcccctgcattctagcctgggcaacagagcgagactccgtctcaaaaaaaaaaaaagaaaaagaaaaagaagaaaaaagaaatagatgctgtgggtattcagatctgtcagagtgctagctcagcctagcccttcaagtagcagaataaaggaggaaagagcatcccaggccttcccatccccattcaactccctcagttagagtggtcctaagattgcggtgggggggtagggctgtgttgaagaggttaaaaacagagattagtcagatccaatcctgctcccactctatggaggaaacaaattcgaatacatagtcacagcccaggctctgggattgagagacagagagagagattggattggagagagagagagagagagatgggattggagagacagagagatagatgggactggagagacagagagaggggttctgtggctctggaagcctagagaacagagcctgaagacagagaggaaagggagtaaaggggaggcatttatgcagagatctcagaagtgaatatgaaaggcacccctagcagaacgcacagcttgggcaaggaggcttgctggcatgaaaacgcaagaagtgctcaggcagctgtaattctccaggacatcagataaaaggtaaaaaacagatgggagacgcgcctagacagggtattgaataccagcccgaggggcttgggtttcatccaaacagcaaggcaactgagctcaacacagtgagactcggtctccacaaacatttttttaaaaattggccgggcctagcggcgcgcgccgatagtcccagctatttctgcaggctgaggcgagaggatcatttgagctcggggaggtccaggcggcagtgagccaagatcctgccactgcactacagtctgggcaacagagcgagaccctgtctttaaaaaagtaaaaaaaaaaaaaaaaaaaaaagaaagaaaaagaaaaaagagagaagggcaagtcgctcccttctctgggccttggcataaatcaagcacaaatcaaagtctcactccctcctcctgccgcgcaacggcgcggagagccagccagccagccagcggaaccacggcctggtaacccaaaacctgcacaccctccagctccccacaggacgtcacgtattaccaccgacgcacgcgcagaagccttcccggggactcaagaaagggcaggcttagcctcctccccatgtcgcccctcattggctagaaactactgctcgtctcggtcgttgttagcagcgaccagggcgggtacaatcttggtcgctaggacacggctaacttccgctttcttccccctctcctaggctcaaactagtcaaatcttgttcactcgaccaatggcaaatcggaagtgggcgggacttcacaagtccggaccaaagaaacgcgagcttagccctgggtagcgcggccaatggccgtggagcagcccctgtaaactggctcgggcgcccccacgcccgcccttccttcttctcccagcattgccccccccacgtttcagcacagcgctggccgcagtctgacaggaaagggacggagccaagatggcggcggccgacggcgacgactcgctgtaccccatcgcggtgctcatagacgaactccgcaatgaggacgttcaggtccggaggctacgggggacttggggaagacgcggaggggtacctgggggcacgggcggccctcgcggagaagactcagcgttcgctgggagtggcggaagggggcgacggccaatcagcgtgcgtctcttatctccccggttgcccggactccttgagacggcgctcccgattgggtgtcggcccagtggagggcgggggccagcgctagcctcgagggtcccgggcctgccctgtgcgcgcggcggtccgcggtcctgggaggttgtggccagggctggggtctgcggactgggtctgggagagaggaggactccgtgattggcggcggcctctgaatggcctcttggggatgtggggcgcgcatgacttgctccaagtaggggagggccgccgggtgggtcgggacctgggaaggtttttttgttttctgggtttcgactgctgggccaagtggggaccgagaggcgaaggcctgccatcctaattcctgctcttcctccgcctctcattttggtttaggtgtcctaagaggacggggacgcaaaaacacccccccaccaaaggtggggactagccaagtttaggagcgaattaggttgtagaaacccgcctccccatctccccggatcctcccattgaccaggataggggttgagggatttgctaagcagatgaacatttatttatttcttttttttgagacagtctctgtgtcgcccaggctggggctggggagcagtggcgcgatctcggctcagtgcaacctctgcataccgggttcaaaccatcctcgcccctcagctccctaattagctgcgattaccggcgcgagccaccacgcccgactaatttttgtatttttagcagagacggggtttcaccatgttggccaggcttggtcgggaactcttgacctcaagcgatccacccgcctcggcctcccaaagtgttggaattacaggcgtgagccaccgcgcccagcccggatgaacattcctggttatgggatgaggtgacccaaggctctgagccgggctggtgtgggattgagaacagttagaactgcaagtccacctcccacctgctgtgtgaccttgtgcaaattacttcaccgctttgggtctctgtgttccataaaatatgggctaattgtagtcctggtcttgctggagggacttgtgagggactgaacgaattatgacacaaataaaaagtagaatggtgtcaggcctgttgtaagggctcgataaatattagctgtaattattgggagtggtgattaaagaggtcccatcctccctttaggtctgttttcccatttataaaattggacaaggtgcactgggtaacctgccaaacgtgggtctcgcctcctaggttcctggtatatcactgtttctggtggcatacaggttgtggttgtattcccggcccttccacttgttactgattgacaagggcaagttagttaatctctctaggcctgtttcctcttctctttaatggggttaattacctagttcatagggcggttgtatgaattcttttgttcagtaaatatatgccatgtatgagatatgatgctggggatatagtggagacaccagttgctatacaggatccagatgtgaaacaggtcagcagagctgaatagatgagtgtttgaaaagtgatgggaaggaaacaaataggatgtagtggtagcgaatccatattgaattgggcctctattctgtgcagggcgctgttctaagcactggtatatagcaggaacaagacagaaaaaactctaggccttggggagtttattttgtagtgaggagagacagacaataaacagagtatactggggataagcattagggagacaaataaaaataagagagatggggtatatatagggcatgcagttttaaagtgtggtcaggggaggccttgttgagatcctgtttgagaacacgcctgaaagcagagggcacagcaagtacaaagtggggtggggcagatccattttaagaaggccaatcaggcaaggcccctctgaggatgcagagtttgagaagagattgaaagaaggtgggggagagcctcccaggaagagggaacagatatgtaatggcctttttttttttttcttctttttttgagacggagtcttgttgctctgtttcccaggctggagtgcactgacgcgatctttgctcactgcaacctccacctcccgggttcaagcaattctcctgcctcagcctcttgagtagctgggactacagacgcaggccaccacgcctggctgatttttgtgtgtgtgtttttagaagagactgggtttcccggtgttggccaggctggtctcagactcctgatctcaggtgatcctcctgcctcggcctccgaaagtgctggaattacaggcgtgagccactatgcccggccagttttttgttttttttaactccaggatcacttccttcagctatctatcctcccatcttttcattcatccatccatccactaaccagcagacatttgtagggagatgtctttgtgccaggatcagagctaggcagcttaccggtttattctaaagaatattgcaaaggatacagatgaagacacatgcagggtgaggtgtgggggaagttgtgtggagcttccatgccctccctaggcattccaccccccaggaaccgcgaggtgttcatctgtctggaagctcctatggctgcttttgtgctacagcccagagttgcatggttgtaacagagatggccgcaaagcttcaaatatttgctgtctaaccctttgcagggaaaaaattgctgacctctgacttaaaccatctgcgtaacaaattattgggtgcttgctctatgttaggtacagtacagaggaatatcactgacgatcttactgaattctcacaatcactctttgaagtaggtcctgtccttgtccacattttccagatgaggaaactgaagcaccataaataacatggccaaagctgtgcagctgagaaatgaaggagccaggaaaggaagtaggacctaagggtggaatagaatctggggtgggacacacggttgctgattatattcatatgccagacattttaattgtgtctgagacagttcaggatactagaaggaacatgggacatgaaatcctgtagtcttgatttatttgttcagcaaatatttatcagcacctcctgtgtgccagactctgttttagatactagacatacagtagggaacaaaacagcaaagctgcccttgtggggtttacattctggtttgggagacagatagtagatctgtagtgggatgtcagtggcagtaattgctaagaagaaaaattgctggacgtggtggctcaagcctaattgtaacactttggttttattttattttattttttttgagacagagtctcactctgtcgtccaggccgtctctgctcattgcaacctccgcctcccgggttcaagtgattctcctgcctcagcctcctgagtggctaggattagaggcgcccaccaccacatccagctaatttttgtatttttagtagagagtgggtttcaccatgttggccaggctggtctcaaactccctgcccgcctctgcctcccaaagtgctgggattacaggcatgagccaccacccctggccaattctagcactttggaaggccaaggtgaaaggatcgcttgagcccaggagtttaagaccagcctgggcaacaaagtgagaccctgtctctaccaaaaaaaaaaaaaaaattagctggtgtgatgacacaggccttggtcccagctgctcaggagactgaggtcggaggattgcttgaaccagggagatcgaggctgcggtgagagcctgggcgacagcaagaccctgtctccaaaaaaaaaaaaaaaaaaaaaaaagaacaaaataagacaggtacagggaatagagcaagcacctggggctgctttgttagatagggaggttagagaaagctgctctgaggaagtgatgttgaacaaggatttgaatgaaatgaacaggtcgtggaagagcagtctgggcagagggaatagttggtacaaaggccaggagtgggaggatgcttgatgcgttcaaagcacagcaaaaaggccagtgtgactgaggcagagagaatggcaaagtggtgggaggtgaggactagaccaggactagatcaagtgaggcctgtgggccaaggtgaaggccttgaagatgggagggaggaggaggaattgcaaggctttcagtagtaattatgggttctggtataattttaaaggatccttcctctggctgtcataggggttgggccctgttgaggtgccattacaaagcacccaggaccagtgttagcatgcaggggggaagtatggttacagtcaggacatgttgaggggggctgatgggatttgctggtgggtaatgtagagggaagagttgagggtgactgaagtttgaacccccgctctgccagttgtgctctctgtgtgcccctggagcagtactttcccctctttggacccagattcctcatctgcaaaatggggataatgatgaagaatcagcgtgtgcctggttgtgaagatgcagtgaaattggcttgctcattgttctgcggtagtcatatggtggggattgagcagacctgaggaaatggggcatctggggaaccgtgtgggaccaagtcagcaagtgctaaagcctgggttgggaatacactgggctgtttgtttttttggttactatcaaggaagcagttgtgacaagccaggcccagtgagaatggatcagtagactagggtcagattgtgttgggccttgtaggccagagtaaggccttagcttttattctgaatgtgcagggaaaacatactacatgtgggattataccatatacattcatattatggaaggctccatgggttgaatgcagggtggatcttcaaaagtgggtcccctttccacaggtgcatatagtgggaaggcggattttatttattaactcaccacagagcaggctctgtgccgaggcctgctgggacacagagagtcccagtctagggtggtaagtgctgtcatggaaccatatgggtggactctttggaaaatcccaattcctattctctcacttaacacaacaatcaacaacacagaagaagacttccgtgactaaatgtgtgttggggtggggagggattcttcaccaccactaagcaagcattcagttctgcagcacacgccaactggatgtcctccaattcagttcagacacgacctggagacagtgttggatccaacaggttgagggctcaggcctcaaaactgccccttggccctcgccttcagttgccattctgggtcgtcagaacttctgatctacctgcttcaagttggagttcccatgaccaccctgcctttgggtttgattaatatgctagagcagctctcagaactcagggaaacatgtaagtttatcagttcattataaaggatagtataaagaatacagatgaagagaggcatagggtgagctatgggggaaggggtgtggagcttccatgcccttcttgggtgcaccaccctccaggaacctctgtgtgttcggctatgttgaagttcccaggccctgtccttttgggtttttataaaggcattgttaggtaggcaggattgattaaacctggtgatcaccttgaccttcagcccctctccgatccctggaggttgtggggtgggactgaaaatcccaaccctctaatcatgcctctctgttttccatgactatctttccagtgaccatggaccccatcctgaaggtatcagtcaacattagcatacaaaaagcgccttggagattccaaagatttgaggagttgtatgcaaggaaatggggatgaagcccaaatctgtatctcacagtatcacaactgtagcaggtgcttggtggggacacacttgggagatagtcagtgcacagggaattctcaggatatgacatgatcaatggccagtcaaggtttctgaaatgatattaatagattttctatcaggaatgtgacggagaccccaacctagagttgtttaaacaagtaagagttctctttatttctcatatagcaagttcagcagctcaaagctatcacagaattgggtcagctcaaagatatcacagaaatgcggtttttttgactggcctgttttggttataagattccagcagcatctgctgtcctagtggaactgcactttttagtgcagtttagcagaggccagcttaggacacagaggttctttccctcctcccttttatgaaggaggaaaatctctcctgaatctcctcagcagacttgcttgtatatctctttgccaagaactaggtcatatgcagagttagttgaagttaagtttggctgtaagtagtagaaaaactctaaataacaggggcttaaatgagcttgaagtttctatctgactgatgaccaaaatgtctggtggcaatccaggctgctgtggcacttcatggtgtcagggtcccaggctcttaccattatgcgctggttgtatcctccattctaccctccgtgtcccccaggttacctcaggtccccaagttggctgccgaagccccaaccattatagctccattccagacaggaaggagggaagataagtgtgacccccatccctataagttgcacaaaacatttccacttggattttattggccagatgttagttttatagtcacattcagatgcaaaggcaattcagaaatgtcttttccaggggtcatgtgtacagctgaaaaccaaggattatgaacagcagtatagccccatgcaggagctcctaacttggggatcatctgcaattcccaggcaggtccatgaatttggatggcaaaaataacatctttattttcattaacctttaacttacatttaacttcccttctgttatagattataatatcactatagtatatcataggtagcgttagcaaaacctgtgacttaccagtggaaatcaggagttgtgttcacatgtcatttctgctattatacatatcttctagtgttgtttatgttcacctctttcaaaattgcgttcattattagacctgctaaggggattcatggcaccaccccacccctctacaagagaaaaaccaaaaaaagccgggtgcagtggctcatgcctataatcctagcattttgggaggtcgaggtgggaggattgcttgagctcaggagtttgagggcagcttgggcaacatagtgaggcctcatccctacaaaaagttaaaaaactagctgggcttggtgacacctgcctgtagacccgtctacttgggtagctgaggcgggagaatcacttgagcccgggaggtcaaggctacagtgagctacgattgtgccactgcactccagcctgggtaacagagtgagaccctgcctcaaaacaacaacaagcacaacaaaaaagaaaaaacagagcaaatatgaatccatagtactggttaagaacctggtggctgggattcaaatcctggctttactaccagtaagctgtatgcagttaagctccctgtgcctttgtgttctctgcctcaagacgggggattctgtatttccctcatgggattgtgagggtcaaatgaattaaaacattaaagcctggggcatagtagagactaaggaaatatttactgttattattctgtcatggtgaaaaaagggaaaagaaacatcagtggaccagctgccacgatgtccttcttaataatctgaacaaaatcaggatgctgtcagtgaggcgtggttgccacggctgccattattaatcttcccctggtgctagggtgtccctgtagaatgtcattttgtactcaagacaaccctctgagggtaggtattctcatcatccccacttcacagatgagaaaattgaggctcagaaaggtacaaggattgcccaagattccacagctaatatgtaagcagtttagccttgaacctggacagtgcagctctgtagtaccaccctaggccatctttctcaagcattgatgatgctgtctgcctgaagaaacacttttaatgaaaccaaaagcagaatcccaaagaacagcagtggaaggaagggagctctctggatgggaaagcagcctgattgtcatgggcccacctcttgggcatccccagcttcaagttggggttcccacgaccccctctttgggtttgattaatttgctggagcggctcacagaactccaggaaacacttaggtttaccggtttattataaaggatattccaaaggatacagatgaagaggtgcatagggtgagctatggaggaaggggcggggagctttcgtgccatccctggggatgccaccctccaagaatgtgcatgttctgctatcaggaagctctctgaatcctttcctctttggtttttatggaagcttcatgatacaaacatttttgcctaaatgacagtatgatattgaaattgagtcaggctgcctggcttcattgctttccagtaagtgacagcctcacctctgtgcatcagtgtcctcactcgcctctgtgcatcagtgaagtggggacgctgctaacaatacatacctcagagcagttatgaggattcagtgtgttaatcatccatgtcaatcacttggattgctgccaagcacgtagcaaacaataaatgtttgttgctattgttctggcatttatgattatgattattaattgtaattattccctgtaccatctcattgtcctcagggctgttgctcacctagtatggccctagcccatgtgtatatttccccatagctcaggctgagagaagaacacacagatcaacttggagaaaacaaagaggaaagaaataggcaactaggtcaatactccccacagtattttatgttattttattttatttatttatttatttgagacagagtctcactctgtcacccaggctggagtgcagtggcaccatctcggctcactgcaagctccacctcccaggttcacgccattctcctgcctcagcctcccgagtagctgggactataggcgcccgccaccacgcccggctaatttctttttgtatttatggtagagacggggtttcaccgtgttagccaggatggtctcgatctcctaacctcatgatccgcctgcctcggcctcccaaggtgctgggattacaggcatgagccactgcgcctggcctccccacagtattttattatgaaagttttcagacatgcataactttggaagactaacacaagggtcagcagactacagtccatgggtccaattcagcccactgtctgcttttgcaagtaaagttattggaacacagctatgcctgtttgcttctctagttctggttctatggttgttttcagtgccacgcaagcagagttcagtagttaggtttgcaaagctgaaaataattactgtctggcaatgtatagaataagttttgctgacttctagcatagtgcagtgagcacctctatacttacaccccaggtcagtgattgttagtgtttgctatattagttttttatctttctataggtctgtctctatatacgttttattttttagctgaaaatcagttgcaggttttgtagtactttatcctgaggtccgtttaatgccagaatggtgagtttttggactacctgtatgaaagatttactgtgtgcatttttctgaggagagaccatcacaacacttcatcagatgctcatcgtctgtgatcgcagagatattcttcaactcctggaccggagaacccaactcacgcaagatcttagtcacttgtagacctcgtctcagttatgtagggcctcagaacagaacaggctaagggagctcctgctcctcaacctcgccctgtccctacctgttctgcctctatccaggaagaaaggtcccccgtgggaccattagtcactctccccctcatgaaagcatttcctcccactctcacactcatgagctcattccattcttgtgacagtgctgggagctattaataataggagaggcctcgtggtgatgaagaaatgaggggagagtttcacagtctgtcctgccatcagagcagctggctttggatcccacactccctcggtgcttgctttggtaggtgtctttacctctctgatcgtcactttccaaagtggtgaaaagaggatattagccatgcttttcttttaggatctggaggatcaaatgaggtcccaacatgtaaatgcttgttgtgagatctattatgtgtgttagccaaatataatagttctctaggactgccacagcaaatcaccatgaactgggtagcttaacacaacgaatttattctctcacagttctggaggccggaagtctgaaatcaaggtctcggcagggttggttccttttggaggctctgagggagacccattccatgcctctctggaagttaggacttctggtggctccagcaattccttgtgttcctgggcttgtggatgcatctcctggtctctccacccatcttcacatgcgtgccttcccctctgtatctgtcttcctttctgtctcttagaaggacactgtcactggattcaaggctaaccctccgtttaggatgatattatctggacacacttaactacgtctgcaaagactgttttgacgtgcacgtcactggattcaaggctaaccctccgtttagggtgatattatctggacacacttaactacgtctgcaaagactgttttgatgtgcacgtcactggattcaaggctaaccctccgtttaggatgatattatctggacacacttaactacgtctgcaaagaccgttttgacgtgcacgtcactggattcaaggctaaccctccgtttaggatgatattatctggacacacttaactacgcctgcaaagactgttttgacgtgcacgtcactgggacataactttttgaggctgctattcagcctcctgtactggtggtattattactactgctaatgctactcttgtttttgtagtcattttattacaataatttttttttctctttgagacaaagagtctcactctgttgcccaggctggagtgttgtttgttcttttacaatcacttagccagcaatcctggctttaaatcctgctccatgtgatcttagctgtctgaccctgagaggggcttttgttccccgagcctgtttccctgtctgtaaaatgggactccagctagtgacatgggtgcaggtgtgtggatgtgtttagccgaggaccgggcacagaggaagcgtgttataaacgtggctgctgctgttaaagtacagtgcattggcatgttacatgatactgtgtataggagaaagtgatgaagagagaggaggagagggagtacagttttcaacagagtggtcctggaaagtgcaactgagtaggtgtcaccttcataagacccaagggatgcttttgcatttgttgctgctgccactactattgttgttatttaatgattccctcgaggtcacagggtctcttggtgggtgtttgccaaattactcttgagcatcttcacatgtaaccaagcaaggcttccaggggctgactgggttgagagctgtcagaactcacgcgtgtctgggatttctaacattctcccctcctcttcttgttctctcattagcttcgcctcaacagcatcaagaagctgtccaccatcgccttggcccttggggttgaaaggacccgaagtgagcttctgcctttccttacaggtaacaaaggggacccctggggcccagatgtggggactcttgggaggtggttttcactatataagagaagacttgtggatttaacatattgtttgtgaatatctgccctgtgttagacactatggagtgggaaaagggattcagagaagtgcagtcttgctctaaaagaatggtctggaatgatggagacagatggtgaaagggatctagaagcaggtagaacgaggtttgagttgcagctccaacagttggaagctggtgactttagacaagttagtttacctgtttcttatatttttcatctgtagattgggataatcatccatgtgccaaagtgttgatctgagcattcaatgttaataacaattgctaatacttatgatatgcttactgtatgccaggtggtgttctacaccgtatcttgtgaggattgagttcatataaagtgtttagaaagctgcctgtactcagtaaacatacatcactatcatttcacccagttgatctcacagcagtgctttaagcaggtaatactgctgtccccatgttatagatgaagaaaccaaggtgtagagaggtgaagtgattcatttgcccaaggtcatgcagtgaggaggtaactgagaagggatatttatctagtcattctggcctttaacttgacagcattggttaatgactgatttcaaatctgagctctaccactttctaggtgtgtgactttgggcaagatattttacatctgcctgcttcagattcttcacaggtgaaatgggcataattatgtaacctaacatgaagactaaataagatactgtaaagtgcttataacactgtatagtacgtgccgcctaagcgatagctgccaggctgttactaagcactgctgtttgtgaggatgtaggtaaagcatttaatacactgtctgacacagactggaccacaattaatagtaaattctctgttatcattattcccattactacttcatattttatacttattaccagctgaaatcacagctgaaggttcagagtgctttgtcactaaactcttgtgtatgggaacatcttacttggacctagtgatgatcctggggaggaaggagcttgagattgttacccctccccacactggacagatggggtattggagcctaaagaggtgcagtgactcgcctacagtggcacagctagtgactgaggggtgcaggtgtgtctgactggatggtgcatgaagagtaggtgtctgctcgtatgacactgaacaaatggccccaaaccaggtggcttctattggtgaactgttggggagacttgaaagctttagaatgctgaagcatggcaggataataaagtggtgaagaagttgtagaggaaaaatgttggacctgggtttgcaataagcagctctgccactgacttgctaggaaaacctgagtaggtcactccacctctcttagcctcatttcccttgtctgtaaaggagtctaataagaggagtacctaacactcggggtgtgtagggaaaactctgtgactttcctctactttcacaccacagcaatcataacacagaacatgacttctgtgaccatatgtctgggtttttttccccaaactaagcagtggacagcagctggttgtcctctaattcagttctgacacgtctgcccagagacaggttcagatcccacagattgatagctcagtccccaggactgtccccagccctgaccaccagtcgctggtcctgtggaacttctgattgatcagcttcaagttgggattcccacgaccccctctttgggtttgattaggctcatagaactcagggaaacacttatgtttactggtttattataaaggattttgcaaaggatacagatgaagagatacagagaatgaggtgtgggggaaagggcctggagcttccgtgccctccctgagcccaccaccctcaagaacctctatgtgtttcaccatctggaagctctctgaaccctctgggtttttatggaagcttaatggcagagggtcctgagtggaacggaggcaccagccatgtggaactctgtgggaagagcatttcaggctgtggggagaggcagatgtaagctcagtgtgttggaagaatagcagtgaggtagccatgggttgagcaagattgttaagggagagtgagactaggacatgaggttggagaagaacagtgaccacagtatgtgagatcaggtttctttgaaactattggcagattgaaatgaaagagtgtcgggatttcttttacacctgaaagagtcactctggggtctgggagatcagatggtgtaggggcaaaggtggaagcaggaaaaccaggtaagaagctgttgcagtctcccaggcgacagctagtgatgatcagagtgaccttagtttgggagggttgacaggcttggctcagaaggagctgccaacccttccaagaaggatagttctctgtggattggtggaaagacaaggtgctggcagttcccaggtgtttggccttcagcagcattgcttggctataaggtctagactggagataaagatgaataagaattgagtccgtggatacgcataaggtcttcaggagacaaagaaaacagggagggtggttttaactgtgtgcagagggagccagggaaactgaggctgggaacgagcctaagaacagtgtagctggagtcacattggcgagaatttatttattgaaggaagaggcagagatactaaccctcctactgggccctgtgctgagctcttcaatgaaagcatttatttccctttagtctccgaacaaccctatgaagtgagaacagccctgtggtgatttaggggatgacaaaggctcagagagatgaagtgagctgctgtataagcagccaacagtaaagcaagatttgaacctaccataaaatggagatgatgataatgactccttaaatgagagggttgtggtaaggaggtgatgcagaagttgaacccaccacttacactcacacccctttggccagagcaaggttacgtggccttgccaactgcaagggcgtctgggaaatgcagtcggctgctggattgccatacacccaacttaaatgcaggaggtttaagtgccaatagatgccagggatattagcagcttgtgctgtgcagagatcagcagttcccactgcctcagggatgagaggatggagcttaagagagaggcctttggatgtgggcattagggacagaacggattttcccttcacatattcattctttcagcaaacctgaattgctgtctgtctgtgctcagctctggcaggaactggggcacagagaggagccagtcctgggctcgctgattatagcctatgttaaggatgtggtaaaggtggcatggaaggagagagagactgagcccagagaaggtgtagcggacatcctagaaatcttccaagaaggggcggctaaactgaatctccaaggataaaaataaatttctggcagagggaacagtgctgaggggagaagctggaccccaaaaaagctctcgttgaccatgctctgcgctttatacacctagtcatatttgctcctcactgtaaccgttgctacgagggagggatggtgaacaccattttacagacgcagaagctgggactcagagaggtggaatcactcagtcagtatttcacacccgctagagggcagaagcaggacttagggctctcttatcccagccaagcctgtaccttaatatctgtggcagcccaggtggagagtgggggagcaagtgggcggatggaagaactgagtgctgacagcctgaggaagcagaatggagtccatgtgttctgagcttgggctggggtcagagttgagatgggatagtcacgaagtctgtcttggttccacagataccatctatgatgaagatgaggtcctcctggccctggcagaacagctgggaaccttcactaccctggtgggaggcccagagtacgtgcactgcctgctggtgagtggaaggcaggaagtcctcttgcccaccccttagggtcggcccatggtcctgccggcctagggcagggaggggagcgtgtcagagagcgtggggatcacgtcagaacagccgggccatggacatccgctttaatccaacaagtcaggagtggcttttaatatcgtgaactcagggtgcagttatcatcctttctgtttagtggtcaggtaggtgcccagtgccaggccttacctgggattctacatagggctgtgggtttagagtcaggttgggttctactgcttatttgctgtgtgacttgtaagagaattacttaccctctctgtgctgtacctttctcatctgcacaatggggttatgaaaacctttttaaattaccttgaagagccctagcacagtacttggcacttagtaggtactaaccgatgttaactgcaattgtcattattgttgctgtgacatcatatccagcctttggggtaggagggattccctgtttatgggtgagccacctggagcactgagaggttaagcgtctcttcagattgtatgactagtagatggcagagctgggattcttggtctgtccatttgactgtctgccaggtccccaccccactgcctgcctgtgtgtcccgtgctaggtgatggccaaggacacaaagatgggccagatcccaacaagcagcgttgtttgagagaagatgatctgggaaggcagaccgtacaggttacctagtcccctggttttcactgttctcagagtgctgggccactgctgctgcctctgcctctgccccactcccccagtgattgtgtatttcactgtcgctagagatacaatgtggcaccggcagttgatggtgtattagttagcagcagcctttctcctagctctagtggtgtataaagaatggtgcttatcattgttgggatcttgggatttgagtaaatataacaatttgtttcttcccaaatagcattatgtaaagaaacttgatagttaccattaaattcggatatctcagccttcatctgggcatatgtgtataatttgtgcgtatggacacacagaaaattgtatacaaatagatcgtttcatacattttacacaaaacagggcttaacatgagcatgatgaggtttgggggccagcctagaaggggttccttgaatttcacaaaattatctgtagcccctgcctggtatttgtcaggtggaacttctgagcagtgaattcatagctttcagtagcttctcagaggacttaggagcagaagacattatttttatgaaaccgcaaggcttcaacaagggcccccagggtctgcaactgaggttgggactcaggcttgctgtggagctgggctgggacccagggatccttctcctacctggccagggtctcccaacagaacattctcagtgaggaaagtcccagtcaagccacgcttccttttgggaagcagttccctgtgaccgatgtgcctgacgttcatgtcagccagcagacacatcctggggctgtctgggccaggcagtgctggaaaccagagaagagttagatcagaatagcttgtgcttgctcgttgcctgcagtgcacatcccaagagccttacacagttgtatactgatgttagctgtattgcccagatgaggaaactgaggcacaggcagatttaagtgaattgtccgagctgggaagaggcagagtccagattcgatcccaggcccctaattcttagccactcctatgtgctatcctcagagggctcctggttgctttcagagctgtaaacaagggaggcaggggggtccttaaacccagggaaggcgcctaacctgcttaggtgggatgggaagttgtcagggaaggcttcctggaggaggtggctgttaacctggattttgacaggttataagaaatagaaaatggctttgtgtagtttcttcattccacaaacattgagcaaggtctctaggctatggaaacccagagatgtgtcagacccactcccggcccttgctctcagcagtggtgaaatggaattaattacagagactcctgtagctgcagtgtaaggattgtttttttgtttgttttgtttttttcccgagatggagtttcactcttgctgcacaggctggagtgcagtggcgggatctcggctcactgcaacctctgcctcccaggttcaggtgattctcctgcctcagcctcacgagtagctgagattacaggcgtgtgccaccgcacccagctaatttttgcatttttagtagagacggggtttcactttgttggtcagattagtctcggaatcctgacctcaggtgatccacccaccccggcctcccaaagtgctaggattacaggtgtgagccaccgtgcctgggtgtgagggttgtttctgtgtcagcagctctttttatttttatttttctttgagacagagtctcgctctgtcacccaggctggagtgcagtgttgtaatctcagctcactgcagcctctgcctcccgggttcaagtgattctcaagcctcagcctcccaagtagctgggattacaggcacccatcaccatgcctggctaatttttgtattttttgtagagacagggtttcaccatgttggccaggctggtctagaactcctggcctcaaatgatcacctgccttggcctcccaaagttctgggattacaggcgtgagccaccgcatccggccagcagttcctaactcttttggaattatggatccctttgagaatctgttaaattctggaccctcttcttataaaagtacacaggattttaggcggttcacactcttccctaccctgtgtggtctccaggtttgagaacccttgcccccagacttcacagagaggcttcacagtagtgagtcttcactgtgcaaaggcatcaattgcagtttcttaaatgtgtaccttcctgggccctgcctccagatattctgattgttttggtccatgctgggataggcctccgggtgattctgctgcagggtggtcagggatcatcctttgagaactacttcctgcagtaacctacaggagaagagaaccttggcttacataattactgctcagcctctgtcccaggcctccttataacagattgccgtaagttccaccggtagtcacttggcaagtgttgattgagtaccttctctgtgccagcccaggtggtgggagaactgaggtgaacaagaggaactctgtccctgcagtatcccagtcacaccgcacctatggtcacactcccatgatactgtcctgaacttgagacgtcacgatagcatgaggacctgtgacagtgacattatgctggcttgcttagtattacatttttcctttgaatcattcattgcaactatttttaaatgctatttttaaacatttgtttttattcttagttttactgtaaaaatatacatagaatgtgctattttaattattttaaagtgtgtagctctgtggcggtaggtttattcacattgtgcagccattatcaccctccatctccagaatttttcacctcctcaaactgaaattccaaacccattggacatgagctcccccttccctctcccccagcccctggcagccaccgtaggagtttgactgttctagattcctcatataagtggaatcagaaaatatttgtctttatgactattagctaatttcccttggcataacatcttcaaggttcatccatgttgtagcatgtgttacatgagacttctcacatacaagattcttgagtttttttgagggctgcatttggaaaaccagatttgcttattgccagctgcattctcccatagtgacagtccttggagctggggagcacctgccctccctgggctacatgccctccagggtgccacagtgcctgcctcttcctattcatgcctcctgccacccctgcctgtcaccttggctgatggcatcattctgttacttgactgagccctggaggcatttccatttatgattttttttttcctgctttaaatacctgtcagcccaagttgaatttcagatcagagacctccacacctttatttgaacatattgggataagttgagtctcccttcagtaggtcactaattaagagttcctgtcttgtgctaagagtgctgctgggctctggggatacagtggagagccagtcgtatgtatctgaaggagcacagtcattctaggcccacagtaacaaccagcgagcagtcccgagccccatagtcccccagaaacatgagatcccaattcagtcaccagagctgtgtgtaactgttcatgggaagcttaggtcaggttttcgatcctgacctgtagctattactagcttgggcaagccaggctgtacctcagttttctcttcttttttttttttttttttttctttttgagacggagtctcgctgtgttgcccaggctggagtgcagtggtgcgatctcggcttactgcagcctctgcctcccgggttcaaggattcttctgcctcagcctcccgagtagctgggattacaggtgcgcaccaccacacccagctaatttttttgtatttttagtagaaacggggtttcaccatattggccaggctggtcttgaactcctgacctcgtgatccacccgcttcagcctcccatagtgctgggattacaggcgtgagccactgcgcccggcccgttttctcttctttaaaatcaggacttgctttatagaattcagtgaggaagaacaagcacccctggtacaacacggaggtcctgcctagtacacacagtgagtagatgttctacacagtgtcagtgatgatcattgcactttgagaggctaagaactttctcctcagaaagcaacgtgtgtaattttaaggtttatggaccccagtgaaactccttcaaggacccctaaataagaacctttgtggaaggcacgctgacagagaccttctgctggctggcataatattacgtttttcctttgagtcattcattgcaaccatttttaaaggctattttaatgaaggtcgggatgggtaatagggaagttttctctgaggagatgagcccatgatggggtgcaggatggggctccagggctgcggatggtggagagggagctgtccagtgactttgtgttctcaccacagccaccgctggagtcgctggccacagtggaggagacagtggtgcgggacaaggcagtggagtccttacgggccatctcacacgagcactcgccctctgacctggaggcgcactttgtgccgctagtgaagcggctggcgggcggcgactggttcacctcccgcacctcggcctgcggcctcttctccgtctgctacccccgagtgtccagtgctgtgaaggcggaacttcgacagtgagtctctgcctccttggaagctccaagctcccatctcagctccaaccttctctaaagcctcagactccttttggtctagctggggcccaaatgcccctgaactctctccactcccactcctgcttaccacctgataggccacatcctcgagagttggtctctggacacggccacgtgtcagtttacccacctctgcccccttgctcacttaggaattgagatgatgacaggtcctccttcccactggttaatgtgaggatttaaaagaattatcacacataaagtgcttagagcaaaatctggaacataaaaactttcagcaacttacatctgatggtatctccagcctgtcccaggtccagtgcctttggcagataaaccacctcagttttcagcctcctgctcgtctactttgcaaacgattgaccgtcaagcccgggtttgagcctgactcactccagaactctggtttatggctgtacacttgcttagatacttacactggcccccaccgcctttgatcgaagcaattgctgctgaaaaataaagcctttctgtggctctagacctgcctcttagttaagcagttttttgtttgtttgttttttgagataggatctcgctctgtcatccaggctgaagtgcactggtgcagtcatagcccactgcagcctcaacctcctgggctcaagcattcctcctgccttagcctctcaaatagctgggaccacaggtgtgcaacaccacgctgggctcattttttatttttggcagagatggggtctcactatgttgctcaggctggtcttgaactcctgggctcaagcaatcctcctgccttggtcttccaaagtgttcagattacaggtatgagccactgtgcctggctcgttggttaagcaatttttatgggaatgatgtaatcgtcagcacttagcattgactagatttattatgcgcaatctgcgaagtgtctcacacacactattttcatttaaacctcatgcggacctgtggggtaggtactgttactatcagctccgtttcatagggctgggaagacagagagggggtcatcacttgcccaaggtcattcagctaaaacctggacccacacaactgcagagtctgtgcttgctcctctctgccatactgcctgctgcctcaggatccccgtccccgactcccaggtacttccggaacctgtgctcagatgacacccccatggtgcggcgggccgcagcctccaagctgggggagtttgccaaggtgctggagctggacaacgtcaagagtgagatcatccccatgttctccaacctggcctctgacgagcaggtgagttttgcttcctggccctctgctctcccgtccttctggtggttcctgcccatgaaagagaatcccagagctcagcaaggcctctgctgccctcccactgttcctctcctctccctaggactcggtgcggctgctggcggtggaggcgtgcgtgaacatcgcccagcttctgccccaggaggatctggaggccctggtgatgcccactctgcgccaggccgctgaagacaagtcctggcgcgtccgctacatggtggctgacaagttcacagaggtagatgagcgaccgttgacattgtcccactggtggggacactgacactctcagaagggaagcatataggagctgaggtttccattaggccgatggaaccattgggcgtttgagcaataagatctctatgatcatctaactgcgtctcgcttcgtgtgccaatcctggttgattgacatggcatcttaaagtgctgccttgagaaagattctgaggcaaagttaaggctacgtggaggaaagtgccacaggagcagagaagggtagcacatgtggggtgttcctgacataatcaagctgtcctttcacaaaggggaagacagcccaaaaaggtggggttttttggtgttttttttttttttttttttttttttttttaagatggagtctgtcgcccaggctagagtcttgttacccagctggagtgtggtggcgcaatcttggctcactgcagcctgtccctcccgggtgcaggcatttctcctgcctcagcctcctgagggactgggattacagatgcccaccacgacacccggctagtttttgtatttttattagagacggggtttcaccatgttgttagccaggctagtctcgaactcctgacctcaagcgatccgcctgccttcatctcccaaagtgctgggattacaggtgttagccaccgcgcccagccccggaaagtttaattaactgatcagagtgacactaccagccaggcagaaaggggacaagactccaggtctgtgactctcaggacagtgctccttccacagggatccagattgcctcatcccacaaacatgtttgctgagcaccagctatttgctgggccagtgaattcggatcattcctggccttcatggagctaggcagtctgaaggggaagactgacttaggggaaatttgattataaagtgtcacaggtgtgggacagacagacagatgtggggccttggaagcattgaggaggggaggtggtgttacagctggttctagaagatgagtgggtaagagctaagataggaactttgttccagccagaggacaaagaaccctgggaggtgagagcaagtgcaagcaggaacattcaggcctgatcttgatggcccagcctgagagaaagcaggagagagggcagggtgggatcggagagagggcagggtgggatcagagaggccttgagtgccactccaccctgaggcgccctttgcctttaattatgctggttcccactggcatttgcgggaaggactcagagcttcagaatagcgtaccatcaccacagttagggaaggttcttcccatccttgtctcctgagctgcataaactgtgtcacactgggtcttagaataaaaattccatgagggcaggaattttaggctgttaaaccagttcttggcacatagtagacattcagtaaatatttgcaagatgaataaaaggcagtattttcccaagatatcatgaggtccttcaagatttttacttgttcattcccgtcttcataatgaactgtcctgcttcctaccaggtcttcaggaaccagctttgcagcaggagccgtgcgtctttccatgcctggtgccatgaaacaggcagggccaagcgtgcctccctttttttttttttttaagacagagtctcagtcttttgcccaggctggagtacggtggcacaagctcagctgactgcaacctccacctcccagactcaagtgattctcgtgccttagcctcctgagtagctggaattacaggtgtgcaccaccacacccagctaattttgtatttttagtagagatggggtttcaccatgttggccaggctggtctcgaattcctggcctcaagtgatccacccacctctgtctcccaaagcgctgggattacaggtgtaagccactacgcccagccctagagtgccttcctttctgtcaatctttattgttttatttttattttgagacagggtctcacaccatcacccaggctggagtgcagtggcacagtcacggctcactgcagccttgacctcctgggctcaggtgatcctcccacttcagccttctgagtagctaggacgataggtgcctgcccccacacccggctaattgttttgttttttttgtagagtcagggtttcactgtgttgcccgggctggtcttgttctctgggactcaagcgatctgtccacctcagcttcccaaagtgctgggattataggcatgagccatcgcacttggcctattgttttattttcattacaaaagtaattcgtgcttctggtaacagatctttaagaaatacagccatatataaatcaaaaagttgcagtcactatatcatttgaatgtttttgaatcaggtaacagaaaacttaacctcagtagcctgaataatatggaaatgtgttatttttaatgctgacaacaccgtgaggtaggtgccctcgcagtcctcatttttctttggaagcaaaagaggctcagcgaggtgaagagccttgccccggggccagtcttggcactcgaattagattttagcactgcttccaaggcccacgctctgtcccctaattctggtgccttcactttgattttggcttccttagcccagagtaaactgccagcccctctcactctccccctcctccttcctgtctgcagctccagaaagcagtggggcctgagatcaccaagacagacctggtccctgccttccagaacctgatgaaagactgtgaggccgaggtgagggccgcagcctcccacaaggtcaaaggttggtgctggcagccggaacacagcaagtggggtgggtatccaaggggctggaggtggaactagcacatcaggtctcacttccctttgcctccctctccctgcccacagagttctgtgaaaacctctcagctgactgtcgggagaatgtgatcatgtcccagatcttgccctgcatcaaggtaacagagagtttgatgggaggaaccaagtggatccgagcctgccaaaaagaggggctggagacaaggctttggggatagtcagctgcaaactaggttcccagccctctgggaccaggcagctcttgggtttcaagcagttaggggtcctgactgcagcttgaggctgaccttaaaggtggaagtactttctagaacctcagatgtcactgagtcctgtcattcacagggttttggggttggagtgggggctgctgagagcaggggtcattgaactcttaagtaggtggtactcataaggaatagtgatttcccctgtaccctaagccatcccctgctctatgaatgagaggggcagaagcaggttattgtctcttaggagttggcatctgcttagccacttgctgctgcaggggttgcactgacccctgtgcctgcctcttctctctcccaggagctggtgtccgatgccaaccaacatgtcaagtctgccctggcctcagtcatcatgggtctctctcccatcttgggcaaagacaacaccatcgagcacctcttgcccctcttcctggctcagctgaaggatgaggtaagggcaccaggatctcagctctgggtttgtggaggggacaggcgggtcttcctagattgctagggtttacctagattgaccaggaatctgctgatatctcaacagacatccagatctttgctgagttgcatgtttgtgggcatagctgtgtgttcatgcgttcattcctccaggcactcttcatgaggcctttcctggacatggaggatatgaaaaatagaaatttaaagtttttatttatggccaggcgcggtggctcacgcctgtaatcccagcactttgggaggctgaggcgggtggatcacctgaggtcaggagttcgagaccagcctggccaacatgatgaaacctcgtgtctgctaaaaatgcaaaaattagccaggcatggtggcgagtgcctgtaatctcagctactcgggcagctaaggcaggagtatcacttgaactcaggaggcagaggttgcaatgagccaagattgcaccactgcactccagcctggacaacagagcaagactctgtctcaaaaaaaaaattatttatttatgttttgagatagggtcttgctctattgcccacactgcagtgcagtgatgtgatcatggtctactgcagcctccaccttccaggctcaagtgatcctcccaccttagcctcccaagtagctgggactacaggcaagagccaccacatctagataattttaaaaaacattttccatagagacaagatattatgttgcccaggttggtcttgaactcctgatctcaagcagtccttttgccttggcctccaaaggcctgggattataggcgtgagccgctgcccccagcctagaataagagttttgatccccaaaagccttcagagactggcagtggagagagacaggcagtcccatgatgccattaaggtgttacaggtgctgttaaggatgagttcatgttttttagggtttaggctaaggtgctctaatatagaccccagaatacattctggcttaaattcggtggtggattttttttctctctctcataacagtctaggacgagattcctcacatgtgcttgcaccccatacacccattggccaggagggtcacgtgaccacacccagcagttcaggttgcctgtattacaaaggatgagaggcggtgctgggtgatgactggagagatcatcagggtgaccactggggaaggagtttggacttgactgtgggcaagcggaagagccagaatagagttggtgttagaaggcaccctgaggcttatgtgaaggaaggattgaagtgaggtggccagcagcagtgtaggcagaccaaaccggaggctgtgggagtctggaaggctgaggctagactaagtggtatgtagagatgaggctgcattgatacggaaggattcaagattgttcaggaggcagaagggaccacgtggtggtttttgccttggtggtgaaaaactgggcagatggtgcaattgtgtgctggtgtgtgacatctttcccaaaagatgggaagtgtgtgaggcttcccaaaagcctcagtctttcttccccatccccttctttcttttttatacacaggcgcccacacagtctgctagaaagttggaggaaatactgtaacagaaagtactgcatcacatttcagtcctccatgcccctaaaagttacgttattcaattctgttacagtggagtaatctcttagccccagaattacagtgaattttttaatacattgaaaagagtgcgctatttttaatatttttttgttctttttgtttttccctattagtgggtgattaactgtactggttttaatcagttaattacgtcagttgctaaaagtctgaatcttcattagtgttcatgacaaattttatgacttaagtaatttatctgagttatgcttcacatgcacatagtttttataattttatagatattaatacaatttatatttgtttttgatgctttaatgggcataatttggcaggtgagagcccctcaagttgtctgctatgtcatttcacacctctccagcgttttggggatcattttgcctctggcatgagggaaggatccaggctcagcccagtttgaaggcaagcccatacgtgctgcaagtgcgctaggactggagcattttttgctccagtttcaccttcagcaagcgctatatggtaatcgtgtgctggcagccagcctgtctcagggcagcttctcttagaagaaaagaaccagcatggttttcttggtgtgaggaattcatctgacttatatttgagatttccattttagatttataaactttatattttacattttgactctcaccagaatttataaacttgtctaaatgaaaaaggctacctttttactggtgcaccaaaaataagtctttttaaatgggtgaggtatagtctctgagccttctcttctcatgcacatgttcagcagcttgaggctcacacagcaagggctggagctgggcaagggccagtcctatcctcggaatgtgcagggtttcaacagcccaagcctgccaggcttgttcacttggttattgattcatttcagtgctcctttatttatttatttttttagactaaaatagttttaataaggaaatagttttcttccttcccttctcccatgttgtggattgatacccagaaaggaacccttgttagcaagcagcggagctaggattagaagaatcatgtctgcctgttttttccagggtgctgtattttcctactgtgattcttaaagtcttttcaaaatggataaacatttcttgtgatactattgtaaggtttaaaaatctgcttaagttagtgatccatgctgcttgctttttgtgtgccgttaatgtgttcccagaacggggagctgggcttggacaggagtagtccctcgggagatgtccataaaagttgatgcagctgagctctttccatcctgtcctgggttgctgtgtgcattgcattctctcagaatccttctttcctctcctcagtgccctgaggtacggctgaacatcatctctaacctggactgtgtgaacgaggtgattggcatccggcagctgtcccagtccctgctccctgccattgtggagctggctgaggacgccaagtggcgggtgcggctggccatcattgagtacatgcccctcctggctggacagctggtgagtgaggaggcctgggggccaggcagtgctgcctcaggggaggtgcagtatgtccagggctgtgatggggaaacggggctttgaaggcttagtggaggctgtgacaactgcctggggagtcgaaggaagggacccaggaaatagggccttaaaagatgcattggattcaataagagagaggagggaaaggagcacctcagacaaagttgagaagtgtccggtctttctagggtgggtgtaggttccatgggatgtggctagcagctccccctgtttgctctcctggaacgcttaccttggaacccttggtttctcctgtagggagtggagttctttgatgagaaacttaactccttgtgcatggcctggcttgtggatcatggtgagtaccttcacaggagcagcaagaggagatgggagctccagaaaggcaggatggattggctggggctgtggcgggcagtggaggaggctagagtcactccccacgccgctggatgctcgtatggaccagctcgcatgcttgttagagtcctagagaagtgttgagtgggaggaggacgaaacagatcacccaggggttgcctggtatagtggagagccagagggccactgagcagccagaccagggttttgaatcctgcccttggggctgtcagatctaaaacaagtcacctgctgtctttgaatgagccccacactcattctttgaaacttcttattctggtgccttggggccattatgagaatggctcattgtttacactaagagaggtaaaaaataaaaggtaatatttatctctgtgaagccctgtttgaagtaataagtgccacataatttaggcaaatcacttcttagagccttagtttgcccatctgtaaaatgaagccagtagtggaacctacctcttggagtggttgaaaagatactgtataaaaaaaaacagttactagatatagcacatagtaagtccttttttctctctttggctcacatgcagcctggcacctaggggctgctttgtaagccatggtgagtgtgacctacattttgcccacatcagttcttcacctccaaatccctgtctctctcaccctcacccttctgcagtatatgccatccgcgaggcagccaccagcaacctgaagaagctagtggaaaagtttgggaaggagtgggcccatgccacaatcatccccaaggtcttggccatgtccggagaccccaactacctgcaccgcatgactacgctcttctgcatcaatgtgagccttccacctgcctgctggcccatccctagggaactggagcgcgtgggagaggagggatgctagagggttccccaagggagacacctggcttgggaatggagacatggagtgcatcttctatccagagatgagtccttggggaactgcaggcaagggggtggggctcccagggtcagggtcatagggcctctgggactggggacttggatggtgagggacccagggcctgggagacttgacctgttggagcagcgatctcaagctttatgagcacccctctccttccctgagaaatgtgtgtctctatctgtggtgcgttgggtgagtgtatgggctctaggtcagacctagttttaaattctggtactgccatatattagctatggaccttggatagttacctaaccgatgctttggtcttctcatttgtaaataattcatactgtaaagaattcatactggtaatcacagcctggtgagcgtgaagattaatcaggttatacacgcacagggcttagaacagttatgctacaggtaggaagtgctcctgtctatttgcttttcctacgattataattatctcatgtactacttatttatgtgtaaaccatacacagggctagaaaggaagggatttaaaaataaatataactaagtgttctgatcatttcttcccacgccactctctggagagcattgctttaaggagggatcctagggcttggtaattaaggtcgatctccagaataattaagggaagcctgaggacagagaaactgggacatggtgttaggatggtgttagtggagttgggagattcactccactaactgagtcacccgtattgctcagcctctgtggggcctgatgatcaccagagtggcctggtcagaggcagcaggaaatgagagttagccaggagctttgcatactcacccctgccactcactggcccccaggtgctgtctgaggtctgtgggcaggacatcaccaccaagcacatgctacccacggttctgcgcatggctggggacccggttgccaatgtccgcttcaatgtggccaagtctctgcagaagatagggcccatcctggacaacaggtgaggtctggatactcccccacacactggcaggggcttcttgtgggcaccttaatctttgacctttgaaggtagagcccagggtcagaggcctggcagcgctccttgcttgctgtgtgaccttggctcccttcccttctcaaggtgtgttttctcaactgtaaaatgaacatcacagcatgaaatagaaagagggggtgatgggttggcagtcctgtatactagcaacaagtcattagaaaatgaaatcaccttatgttttatatgtaagtatgtgtataatttataattgcaccaaaaatatcaaatagccaggaataaattcaatgaaagatgtgtatgtaacacctctaatgtaaactgtaaaacactaatgtgagaaattaaagcagacctgaccaaggtgggcggatcagttgaggtcaggagttcacgaccagcctggccaacatggcgaaaccccgtctctagtaaaaatacaaaaaattagccggtgcggtagcactcacctgtaatcctagctatttgggaggctgaaggcaagagaattgcttgaatccaggaggtggaggttgcagtgagctgagatcatgccactgcactccagcctgggcgatagagcgagactgtctcaaaaaaaattaaagcagacctacataatattcacggatgggacagttccctgaactcatctttagattcagtataagcccaataatcttaacaggttctttagtggaaaattgacacttctaatgaacaaagttgtctgatttacactaccagagacgaagacttatgacaccacaataattaaaatagatgtgaacacaagcatatttaaatcgcccaatagaatggaatcaagggtacagaaacagtcccacatgtgtttaacagtaggcatctctgcagttcagtggagaaatgtatgttttttaaaaaacatagctgagtcaatttgatatccatttaggaataaaagaaggctcgcctcaatgcataaacaaattaatttgagatgacagaccagaaccagaaagattttaaaaataaaggacctagaagaaaatgtaggaaaatatcttcttgagttagcgtaggcacagatttgttaaacagcaaaccagaggaagtgatgggtaagttgaccttctgtaaaatgtaacgctgtttctcaaaagacagcattttgagagtaaaatgcaagccactgactggaggaagatgttttaatatatgtttctgagaaaggactcatccacaatacctgtctacaaatcaggcaagacaagaaagagatggggaaaaagacttgaataggcacttgaaaaaggatctccaaatagccagtaagcatatgacaagggtgttcagcatcattagccttcaggaaaatgcaaattaaatctcagtgacatatgactacacgcctcccagaacagccaacattaaaaaagactcagtggtgcaaatggtgaagacatagaagagctggaactctcatccattgcacgtggggctgtacatttagggtttgatcactctgaaaacgggagtggatctggagtggaatttggtgaagcttgttatacaaacagcctgtgaaacagcccttccactcctgggtctctatccaggagaaatgagtgctgtttctgtcagaagaatgttcatggtagctttattcatagtagccgtaaaaatggaaacaacctccatgtctgtccacagtagagtagataaattttagttcattcaaacagtggaaaactattcagcagtgacgaaacaaatgcctgctataagcagcaacaggtgactctcacagataccatgttgagtgaggagccaaaatcaagaaaacacaccatttatgtcaagttcagaaacaggcagaatgaaggaatcgagatgatggaagtaagaatagtggttatttggggagaacagggaactgtcaactgaaagtgtgggacccacaactgcagatttctctttctgtctgttccaggacacaacctcagctttagtttctctccgaagtccccctccgttttccaaaacaattgactcttggtgcaggcggatttccctgggccccatagatgagagtggatgcctcctctgggctcctggaggaccaggaacttccccttggggccacttaccactcccctcttacgtaccagtttggtctcttcctcctggcccgggtgcctcatggcagaaatcaagagtgatttagctctgtattcactcctaatacattgtaggcctcagtgaatatgtgtgaaatcaatgaaagatacccatttgctgggcctcagagacttgggggttctgagattctgttccactttcccagcctgctctgatctccctgtttggggccccagtccttgtttatcatacttctgacctttaagtaattggttggttggttggttttttgcagtttgtttggttttcctttgaggcagaatctcgctctgtcgcccagactggagtacagtggtgcgatctcggctcactgcaacctctgcctcctgggttcaggcagttcttgtgcctcagcctttcaagtagctgggattacaagtgtgcaccaccatgcttggctaatttttgtactttgagtagagatgggggttttcccatgttgtccaggctggtcttgaactcctggcctcaagtggtctgcccaccttggcgtcccaaagtgctaggattacaggcttgagcccccgtgctcggccttgagtttacctttttttttttttttttttttttgagacggagtttcgctcttgttgcccaggctggagtgcaatgatgcaatcttggctcaccacaacctccgcctcccaggttccagcaattctcctgcctcagcctcccaagtagctgggatcacaggcgtgcaccaccacgccctgctaattttgtgtttttagtagggacagggtttctccatgttggtttggccaggctggtctcaaactcccaacctcagatgatccacccaccttggcctcccaaaatgctgggattacagatgtgagccaccacgtccggcctgattttacttttaattgactcataattttatatatttatgggggtatagtagtgtttcaataatgtgtgcaaatgtgtaatgatcaaattaggataattagcatatctatcaccttaaatgtttactgtttctttgtgatgagaacattcaaaatcttctcttatagctgttttgaaatatgcaaaatgttattattaactatggtcacccgcctgtgcagtgatcagagatttctaattcctgtgtgtgccctggattcttgagactcctcccaccttgggtttggtgtatccgtgtctgtgtacactctcttgcccaagagccctgtgcccacctgttgccccagtccatcctggctcaccctctctctccctgtctcctttcgctttccagcaccttgcagagtgaagtcaagcccatcctagagaagctgacccaggaccaggatgtggacgtcaaatactttgcccaggaggctctgactggtaagacctagaaagcacggagccctagcaggagggtggactttgaggacaggcactgggcctgtgggcagcagcttctgggagggggaggtaccttggcattgtgggcagagagagggctctggttctgattcttgcctgttcctgttttcctagttctgtctctcgcctgatgctggaagaggagcaaacactggcctctggtgtccaccctccaacccccacaagtccctctttggggagacactggggggcctttggctgtcactccctgtgcatggtctgaccccaggccccttcccccagcacggttcctcctctccccagcctgggaagatgtctcactgtccacctcccaacgggctaggggagcacggggttggacaggacagtgaccttgggaggaaggggctactccgcccacgtcagggagagatgtgagcatcccgggtcactggatcctgctgctgtaatgggaacccctcccccatttacttctccacctcccgtcctccccatcattggtttttttttgtgtgtcaactgtgccgtttttattttattccttttattttcccccttttcacagagaaataaaggtctagaagtagttggtcctctggccttagtcatcagcttggaggagggggcaccaccccagagccacaacatctgcgcttttctctggagaagatcttgttacaggacccattatacccctatgtcccgaaagaatactctggggatccccccaggagtgctgctggcctttggggtagagggtccatgaggtgctctgggtggtgtcctgtagtgcagttcagattcatagatgtcggccgagtatttggggggttaagagcaggtgccttggaaccagactgcctgggtccaaattgtggctccttcagttaatagacgtgtgactaggagtagcttgttaagtctttatgagctcagttttgtattgtgtaaaatgagagttacagtaatacctagattgcagggtgggtggcgaggaccaagtgaattagtacctggaaagtgtgtaacagtttcaacatgagaagtacacaacatgagaagcagagttagctgtacattgccagagaaccccctgtgggccatttcctgtgttcttgaagaagacttgggcttggaccctgtccccaggaggtctcagagtaatcaggacggtactagggagagaactgtggcaagatagatcagttatctcggtatctattctccccttcctaatgtagaagctctgatttttaactgggcagatgactacatggattcaaggtattttcctagtgtctcttgaaattaggtgtggtattgtgaccaaattctagccaaaaagatgttgaacagaagtggtatatgcagcttctaggaagtgttcttaagggggaaggcgtcatcccccacctttcctccttcctgcactctggaatgtggaccagatggctggagtaggagctgccacctggggccagaaaatgatcttaggcgtgaaggtcaagtaaggcaggacaagagagaaggagcctgcctccccgaggctgtgaagagccatgccagtactgtcacctgggagaattaaactggtcaagtgcctgttcgtttagggtttcatcacttgaaggtgaccggaattctaactgatggagggaggggcccagagcaccctggagaaaggagcaagggacgtatggctggtggtgtctgcatggaagggtttcacagaggaaatgatgcttgagcacattttgacccaggtggtggaagggaaatgtggctttgagtgacaaggtgatttcaccagctcagccttcatattaccacatccctaccctttgttagactttattgtgccctaggggatgaggctgaaggagaccaaaaagcatctttagaaatttccatttatgccctgggcgataaactctctcccagttgagaactactgctctagaaatgtgaacacacgtgtaaccaaacgtcaaagtctgacattaaactttgactttccccatggttaacgctgctggtccattgtaacaagagtgcagtggaccagcagcctttgcattctcaggagcttgttagaaatgcagagcctctcgtccctgccccgacctgctcaggcagagccttcattttaacaagatgcccaggttcatctgcacactgaagttagagaagtcctgccttaaatactaacccagtttttctctcttgagagtgaggttaatgctacgtgggtctagggctgaggatgtgctatggctcagaggtggggtctacaattggacatgtgtatgtagacaaggctcagggatatgttgaggctgctagattgggcaagtgatggaatgggattattacaggaggtggaggtgcgatggatacccaggatgtgctgggtaatgaggtgatactcagcgaccacaggagtgagtatgagagacgagggtgaaggatagcttgagttattgaacgctggcagagtcctgagttaaccaggagttgcctggtgtcttgggtcatgtgctctagaagcagagcccgagtggagactcgttcaagtgtgttactgagggagtgctctcaggagaacggactgaggtaactcaccttctgtgagcttcatgttggaagaatccaatcaggtgatgaatgtgatgttattaagtccattgttaggagtggttcctaatctcccaggctgcaggctttgtttgctccatacacctggccttctctgtagcagctgaagtttgatgctggagctgggtcagggtggagagactgtgtggagccaggactcatgaccctggcctgtttctcccgctctctaggcctaaatcccagcagtcacactggccatctctaatggttccttccacagcactgttcttcagagcccacacacaaattttgtctccttttgtgatgactgcacttctttggctgtttttgccaacagcctcttcactgaccccttccttccactgcattgacccagacatctggatgtggatgaggtcgagtcacttgttgcctttggctaatgcataggggcacgagtagagctctagaatcaccatgcccttgactcagggtgcagaatctgcctatggtgcttgagctgtggttgtcgctagaggagaattaccatggctcccccgggcagatgaagatgacgaggtggtgcctcagccccgaggagtgaactgcagggcaccgacaagattctgcctgtggccatcagggctggagggaaggaggccaggttcatctacccaagctggtggcatgaggcataaatttaaaaaaattggtgtgggcacagtggctcgcacctgtaatcccagcgctttgggaggccgaggtgggcggatcacctgaggccgggagttcgagaccatcctgaccaattcagtgaaaccctgtctttactaaaaatatgaaaaaattagctgggcgtggtggagggcgcctgtaatcccagctactcaggaggctgaggcgggaggattgcttgaacctgggaggcagaggttgcagtgagcctagattgggccattgcactccagccagggtgacagagcaagaccccatatgaaaaaaaataataattcaggaacttgtcaaaaagagaaaatccaataaagatttagtgccaggccttgactccagcaggccttccccgctctctcgatgtcttgccatacagagctgcaaggtggtggggggttacaggctttgtagggctggatttttcccagtcggcctccaggaagggtaagagactagtagctcgaagtttgggttggctgattgggtccttcccagacttcggaggagggaagggaaacctgaggccccaactcttcatggggaatcactgctctctgtccccaagagcacatgcctttcctgacagaagctgagtagcgggaatctgcttccacccaccccttagcttgggcttaggctcagtccccaccctgctgttcctgtaccctgtgcatattctagagcagtagggagaatgggccttccctgatgctgaaaataagaatgaggggctagaactccaatctcactctctaggcaaatggcagatgtttattattcatgaatactgttgagttaattcaggtctgtgttcctttgctgttactcctcttttttcgtatattttgtacagatactaagcttttattttattttattttttgagacggagttttgctcttgttgcccaggctggagtgcactggcactccacctcccaggttcaagcgattctcctgcctcagcctcacaagtagctgggattacaggcatgcgccaccacgcccgcctaattttctatttttagtagagacggggtttctccgtgttggtcatgctggtctcaaactcccgacctcagatcatccgcccgcctcagcctcccaaaatgctgggattacaggggtgagccaccgcacccagccatttttgtttactttttgagatggagtctcgctctgttgcccaggctggagggcagtggtgcaatctccactcactgtaacctccacctcctgggttgaagcgattctcctgcctcagcctcctgagtagctgttactcttaacatggataaaaatactttaaaaatttttcttttttgggaaactaaaagatatgcgattctcaattgattattcagtctgtggccttctactgaaggagcatacagaatctcacctccaggagcatggagctctcttggataggatcctgctttctgaggccagagcttactctcctatgtgatcagaggctttcacagcatccgcagtggtctccagatcagccctatcatggaggcttggtccagagatcttcatatgaaaagggaaataataagtgtctgggagacacttctgcagggatcctgccctgtctcaataatctcccccatggccacagaaataccctgggattttcccaggagctagccgacacacacagatagattatgaacttcagatagaagccccagcctagccctcactctgatacctgtcatccccaaactgctctgaagtgcttatgtgctggtatctcccaagagtctgcatgtcagtgtgtctgtgctagtgtaatttatttagaaaagtgcaaaggcaaagggcaggatcaacaggcaaagggcaggatcctggaggctggatctagggtcctcttacctgatttatgtcactgattttcccaaatattgataaaaatgaattgatctctaggtggcagagaaacaggaggaaccctagactacatagtaagtagaaaataatgctgcatgtcatttagattgagctcagccctgagtcatgaagtcttcagaacaaaggaatagttctcccttatctgatgctcactgtggccttgggcagcctggcatcgagaattctcagcatgttcactcttgagttctgtgcctgcatcacacagcaatggaacagtcccaaaagattcttaagggtggggaaaggcactaagaaaagatgaacctgcagtccctgttataccatctggtctaattgatactactgttgtcaagcaaaaggagctctctccctgaggcactggaagccaatattttgacaccaggtttttgagaaagaaaagttttttattgtaagttgactcacaagatgagtcaagctcaaatctgtctccctgtgctggttttaaggcagtaatttaattataaaacgtttaggaggtggattctggggttctcaggtgataggtagaaggaaaggagaggtctggaaagtcttcaggcatgcacagttctcttcatgtctcctcatgcatcatgcgcacatttagtgggagtttgaaacatggtgaggaaattcaggctgtgacatcagcatgcttggtctgtgcaaactccatttggccatattggtttcaaccaattttggccagttttgtagagggagtttgagcatttcagaaagttatttcttatctgctgttctgtaaattcataatctttgttagttactggtttatttaactctttgggcatgggttcactaccacctgtgctgaccccacttgatcttttgggcctccttacttcccaccttcattctctcatcatactttatatacactaataactcccctgctattctgtatgtaacccaaatatcagctgtactgcctcatctcttagatatctatgtatactctgacctaatcaaaaccagaaattgtggagtgtgaaatgagaaaagcaatagagaggtaacaacagtattgaacaagaagaaggaagaatttgtgaacttgaagataagttatttgaaaatacatgctcagaggagaagaaagaaaaaagaatataaaaaaataaagtcatcaggatgtacaggacagcatcaaaagagccaagttcacattacaggatttcaagaaagaaaggagaaagaaggctatagaaagcttatttaaagaaatagtagccaaaaatgtctatacctgggaaaagagataaatgtctaggtgtaggaagcttaaaggtctccaattagttttaattcaaataaaacttcagcaagacgtgttgtaataaactgtcaaaaatcaaagacaaaagcacaggggtttttgttttttgttgttttgagccagagtcttgctctgttacccagactggagtgcagtggcaccatcttggctcattgcaacctttgcctcctgggttcaagcgagtctcgtgcctcaggctcccaagtagctgggactacaggtgtgcaccaccgcacctggccaatttttatattttttagtagagacagggtttcaccatgttggccaggctggtcttgaactcctagcctcaagtgatctgcctgccttggcctcccaaagtgctgggattacaggcatgagccaccgcactcggcccaaagacagagttttaaaggcacaaaagaagagagactcatcatttacaatggaactctataaagctatcagcagacttctcagtaaaaactcttagaggccaggaggacagtaggttgatattattacattacagcagaaaaaaaccctggaagctaagaataatttacttagcaatctgtcctttacaaatgaaggacgttgtataaggactttcccatacaaacaaaagctaagcaagtatatcacttctaggcctgtcttacgaaaacgataaagggagtttttttttaatatgaaaaaaaggacattaagtagtaacgtggaaacgtgaaaggatagaactctctgataaaagtaaatgcagaatcaaatttcaggatactctaacactgtaatggaagtatgataatcacttatatattgagtataaagtctaaaaggcaaaactgttaaacataataggcatattaacttgtttagggatatacaatataaaagaagtctaacatcaaaaatataaaatgtgggtggaagaataaaagtgtagtgttttctatgtgatagaagttaactttatcaggttaaaatagccatttataagtaaaatatgttatatgcaagactcatgctaatcatgaagcaaaaaacctatagtaagtattcaaaagataaaaagcaagaaacctaaacataccagttcataaatgcatctaataacaaagacagcaagtgagtaggaagaaacaaagaatctagaaaacaatgaggaaataataaaatgaagagtaaggttttttttgttttttttttttgatacagagtttcactctgtcacccaggctggagtgcagtggtgcaatctcagctcactgtaacctccacttccccagttcaagcaattctgcctcagcctcctgagtagctgggactacaggtgcctgccaccacacccagctaatttttttgtatttttagtagagacggtgtttcaccatattggccaggctggtctcgaactcctgaccttgtgatctgcctgccttggcctcccaaagtgatgagattacaggcatgagccactgcgccccgccaggagtaagttcttaactatcaataattaccttgaatgaggccaggcgctgtggctcaagcctgtaatctgagcactttgggaggccaaggcgggtggatcacctgaggtcaggagttcgagatgagcctggccaacatggtgagaccctgtctctactaaaaataaaaaaaattagctgggcatggtggcgggcacttgtaatcccagctacttgggagggtgaggcagcataatcgcttgaacccaggaggcggaggttgcaagagcaaaactccatcaaataaataaataccttgaatgtaaatggattaagttatttaaagacacagaatatcataataattttttaaaagacccaagtatatgctgtgagaagagactaacttaaccattaagaacacagaaagtgaagaactagaaaaagatattctatgcaaatagaaaccaaaacagagtagaggttgaataaacattaaggaaaaactataatagtacaaaaattgtcattatacaatgataaagaggtgaattcatccagaggatataagaattgtaaatgtagatatgtgcaccatcagagaaccttaatatataaagcaaatattaatctgaagggagagacagattgcaatacaatactagtagggagcttaaatatcttactttccatagtggacagatcattcagacagaaaatcaataaggaatcgttggatgcaaactgcactttagaccaaatgtaccctaacagacatacacagaacattccatgaaacagtagtagagtatcattcttctcaggcatatggaacattctccggacagatcatatagataagacaaagcaaatcttatcaaatttaattgaaattatatcaagtattagttcctactacaatgggacaaaattagaaatcaataacggggaatttcaagatggagggatatgggaaaattaaaccacatgctcccaaacaatgggtcaaaaaagaaatcacaagagagattttaaagtatcttgagacaaacagaaatagaaacacaacatactaaatcttgtggaaagcagcaagagcagttctaagggggaagatcagagcaataaatgcctacaacaacaacaaaggtctctgaaacctaacattacaccctaaggaactagaaaaagacaagcaaactaaactcaaagtcagtaaaaagaaggaagtaataaagatccagtgtaatcagaaaaaaatgagagagcagaaaaacacaattgagaagatccttgaaactaagtttgcttttctgaaaagataaatcacaaacctttagccaaacaaaccaagaaaaaagaagagtcaatcagacatggaagatgagacattacacttaataccacagaaatacaaaaggtcataagacaacattatccacaactatatgcccacaagttagacaatctaaaagaagtagagaaattcctagaaagataaaacctgctaagactgaatcatgaggaaatagaaagtatctttcattaatgcagaattgaggaaaacaaattaggccaggtgccagtggctcacccctgtaatcccaccaccttgggaggctgaggcaggcagatcacttgaggtgaggagttttgagaccaacctggccaacatggcgaaaccgtgtctttactaaaaatacaaaaattagctgggtgtggtggtgcatgcttgtaatcccagctacttgagaggctgaggcacaagaatcactttaaccggggaggtggaggttgcagtgagcctagatcgcaccactgtacttcagcttgggcaacagagggagacttttatctcaaataaataaaattaagaaaaacgaaaacgaattaaaaatctgaactgaccaagaatgagaaacgagattcaatcagtaataaaacacttgcatcaaagtaaagcccaggacatgatgtgttctttgcagcattctaccaaacattaagaaaagagtaatgccaatcattctcaaattccttcaaaatatttaagagtagaaaacatttccattctcttttttgaggccagcattaccctgatgccaaagctacacacaaggataatacaagaaaaagctacaggtcaacattccctatgaacttagatacaaaaatcctcaacagaatactagcaaaaaaaaaaaaaaaaaattggcctgcacggtggcttcatgcctgtaatcccagcattttgggaggctgaagtgggtggattacctgaagtcaggagttcgagaccagcctggccaacatggtgaaaccgtgtctctactaaaaatacaaaaattagctgggcatggtggcaggtgcctgtattcccagctactcaggaggctgaggcaggagaatcacttgaacccaggaggtgaagcctgggtggcagagtgagactccatctcaaaaaaaaaaaaaaaagcaacacattaaaggattatttaccataatgaagtggtaggttatccctggatgaaggatgggtcaacctatgcaaatcggtgaatgtgatgcaccacatacaaagaatgaaaacataatccatatgagcatctcaacagattcactgaatgcattggacaaaattcaacattcttccatgataaaaactctcatcaaattaggtatagaaggaatgtacctcagcacaacaaacgccacatatgaccaacccacagctaatactatgcccaaagatgaacagttgaaagccttgcctctatgatcaggaacaagacaaggaagcacactctcaccacttatatttaacatagtggtgaacgttcttgccagagcaatcaggcaagaaaaagtaatataaagcattcaaataaaaaagaaaagtgaaattatgcttgtttagtaatgatcttatacacagaaaactcaagactaaacaaaaatactgttagaaataatgtgataataaatgaactttaaaaagtttgaagataagaaattggtgagcaaaattagttgcatttttatatactaacaattaactctctgcaaaagaaatcaaaacaatcttttttcaataaccagcaaaacaataaaatacatagaagtgattttgtctgaagaggtgaataacctgtaaacagaaaattataaaatgttgataaaacactgaagaatatacaaaaaaaatgaaaagatatgtcgtggttgggaattggaagcattaatagtgttaaaatgtccgtactaaccaaagcaatctgcagattcagtgcaacccctatcaaaattctaatggcattattcacagtaatagaaaaaacaatcttgaaattcatatgaaacccaaaaccccccaaattttccaaagtaatcttgggtaaaggaaacaaagctggaggtataacactacctgatttcaacatctactatgaagctatactaatcaaaacatatgacactggcatgaaaacagacagatggaccaatgggatggaatagagagctcagcaataagcccatgcattcatggtcagctgacttcaacaatagtgccaagaacacatgatgtggaaggatgcatttggatatctacatagaaaaacaataaaattggggttttctaatccgatttttattcaaatattgcctcaaaatgcgttaacaacttaaacataaggtctgaaactataaaactactagaataattcataggagaagagctacatcatatttgtccaagcaatgatttttggatatgaccccaaaagcacagtcaatgaaagcaaaaatagacaattgggattatatccaaaacttctgtacagcaaaaagttggggtgctggtggtgaagaaattttgattaattagtacaacgatatggttagaatgaataagctctactgttagcacagtagagattattgttaacaataatttattgtacatttcaaaatagctaagagacgatctaaaatgttctcaacgcaaagaaatgataagcatttaatgtgatgggtatcctaaattccctgattagttcattttttgcttcagtaaatgggatcttgctctgccacccagtggcgatcatggctcactgcagccttgaactcggctcaagggattttttccacctcagcctcctgaagtgctcagattacaggcataagccactttgctcagccaaaaggggccaaagggtggatcactgaaaggtgttatgtgaaaaattttgtgctgctacccaaatctaaatgttgaagtgccccgaatctccagtaccttagaatgtgttttgagatagaaccctttaagggcgattaaattaaaatgagggtgttagagtggggtccaatcaatctgactgatgttcttatagaaagggaaaatatggacacagagagagacaccagagtgtcgtgcacataaagactttgaggacacttcataatggcgaccatctgcatgccaaggagaaaacagcaagcctgccttcacctcaatcttgaacttccagtctccacaacactaagaaaattaatatctgttgtttgtgctacctagtcaatggcattttgttatggcagcctgagcagattaacacacaaggcaagaatctgccttttctttctttctttctttctttttttttttttttgagacagactctcgctgtgtcacccaggctggagtacagtggcacaatctcggctcactgcaacctctgcctcctgggttcaagtgattgtcctgcgtcagcctcccgagtagctgggattacaggcacccgccaccacacctggctatttgtatttttaatagagacagggctttgccatgttgctgaggctggtctcgaacccctgacctcaagtgatccacctgcctcagcctcctgaagtcctgggattacaggtgtgagccaatgcacccagcagaatctcccatttcaatgctgacacctctatgagtttctaataatctctcctcatgagttccaggttgccagtctctgaggatgtcagttcttacagcttgagcctctcagaaaggagaggtttcacagggaggtataaagaaagcagaatctgggcgtacatctcccattattattgtttgcccattttcaggaattaaaggataacaaagtcaccaaggggtcttctccattagagggaaactgctgagatgtagtgtgaagagtactgattggttttagacgcagaacttcctgttgctgtctttggacaaatcgttaacttttctaagtctgaatcctccagtgatatagcagttgccagcattcctcgcagggatattgtgagtctcacagggcattctgcacgtgaaaggaggtggtaaatataaatcactgcacatgtgtgaggcttcatattatagtcatagatgttttggatcttgcttcctgatttctgatgctcacagaatctaaaattacaggatttaaccaaagagggcatttttctcaaccttctgtaaaatccctttgttcttaattttcaccacatcagaagcagacttctatcttctagctctgacattattcagtgcatgggtcttaatttagaaaagtaactgagtgatgacacagagaggccaatgggatttttaaaggaaaggcagggcagagcagggtgcacagttcaggattggccagattgaggcattcctgagggccttggggaaaggggctgttcctagttgtctggtacctggctttgtgttgacttaggagagcagaatattggcttggtgtgtgagagtttgacatggagagggttggggcatgggctctgggtgggtaaattttaataggaaaggctggctccaggaaacccacttctacatctaagaatgtgctagccccaagatgggcagtctctacccagtcagggaagacacagtcacagcaccaaagaacacagaaaataaggaaatataataaatataattggccctgtgatggacaggtgccaaacagacaaatacagaatctaaagaaatggaattaaaacagagtttgtcacaaaaagaaagagaaatcctggggattttttttcaaaacaacttcacttctagtctttttttttttttttttttagatgaagtcttgctcttgttccccaggctggagtgcaatggtgtgatctcggttcactgcaacctccgcctcccgggttcaagcgattctcctgcctcagcctcccgattacaggtgcctgccaccatgcccagctaatttttgtatttttaggagagacggggtttcaccactttggccaggctggtcttgaactcctgacctcaggtgatctgcccgcctcggcctcccaaagtgctgggattacaggcgtgagccaccacacccagcccacttctattttttaaatttctatttctaaactagtctttgcaatttcagtctccagtgaagtctcgggttgacattacaggaagagggggagaacctatagggaagagaagggtctcagaggtggctatttggatgtaggactcataactgcctctgttcaaggtaggagaaaatgctgtagtgggtttcttcctctattgactctcctctatcttagcagtgcttgtggaaaccctagtttcttccttgggattcagccaatgaatgtcttactagcttgagtttcagcgactctagagttcatgtagaaagctctaatactacatgaatttagatattgtctgaggataaaactgatttgccttttttgcagggcaattttcagttattcttttgttcctgggttgaagaaactgatgcatatgtgtcttggagtttaacttttttttttttttgagacagagtctcactctgttgccgggcacagtggctcaccctgtaatcccagcactttgggaggctgaggcaggcggatcacgaggtcaggagttcaagaccagcttggccaacatagtgaaaacccgtctctactaaaaatacaaaaattagccaggcatggtggcgcatgcctgtagtcccagctactggggaggctgaggcaggagaattgcttgaacccgggaggtggaggttgtggtgagatgagatcgtgccactgcactccagcctgggcaacagagcgagactccatatcaaaacaaacaaacaaacaacaaaaaccataatcataaagatatattcacaaaaaattcttatggaatataggagccaaatatgaaataatttatgctgatttcatttatatcaagtagcaaacagacaaatgtgatttaatctcttaaatactggaataaatgtaaaccagtatcttgacagcaacacttctacaaatagttccaacagaacgacagccttgaggatagtgacttagcacagaggaacttctggtgaactggcagtattgtttcctcatccatgtgctgcataaagagttatgttcttttgtgaaattccagggaactgtgatttataacctataataagtctttgacttaatcaaaatacatatcactggaagccattatcctcagcaaactaacacaggaacagaaaaccaaacaccacatgttctcagttataaatgggagctgaacaatgagaacacatggacacagggagaggaacaacacacactggaacctgtcgaagaggtggaggggaggtagagcatcaggataaatagctaatgcatgcagggcttaatacctaggtgatgggttgataggtgcaacgaacaaccacggcacacatttgcctatgtaacaaacctgcacatccagcacatttatcctggaacttaaaatttaattttaaaaaaactattaaaaaaataaaaaataataatacatatcaccgaaaagagttaaaagaagttcagggtggggatattggtgctaagaatgtgtgtgagcttccacttgtgtctgtaccagataaaatttatgaagacgcaggcacaggttaacagccacagcaagaaacataagagaataataccaatgctatatatgctgattctttgatttttgtcctgaatacagaagaaaactatcctatcttgttttgtttgtaatgtttctgctgctgtttggcaatcacacgcatagggtaaaaccatatttatcagcatattcaaggtccagtagaggaaaatagaaagctccatatacttaggatagtttatgttaaattctatacatctggagttcctggggctcatcatgatggcttgaaacactgcaggcacaggtggtgccaacggtcacaccctaccaactctgtgaggatagcaaatcagaatccaaaatcatgaaggaaattattcaatataaaatctgacattgatttggtgctgcatacagaggtgtgtcttggggatacccttaaacagaatgcgtaagaagtggctataatcaggtgcttccaattcaaatctgtggtcctcaacctgcatcctgttaagtaaaagaagacataatagtaaagaagacagaaactcttcaggattccaacaaaattctacgacaagtagatcattcctattgccaactccctggaggccattctgcgagttcccagtgactgatattcatctttagagccagaagatcctgcagagaacatgaagtgtaggtgaggtgatattatccattaataatatcaatggaaaaacccgtattctactgagaaacatttaaagttttgttttgcaaagaggctttctagggttgaatgtataacatttaaagagcacttacgatatgggaatcactgctgtaatgtgatatgtataccttctttgatttttgtaactgtatgatggattcactggcatacttttccttgtagagacaaaaggaacttaagatacagagaggtgcagtgatttgtggaaattcacaagctgcttaggagctgagaggagacttgcacctgactagggtgtctgcaaaggtgattgctaaggcctgtgctatcctaacagaccattcagctgtgttttcaaaaaatctggacctagttagttttgtttgtttaccatgccattttattttccatctctggtattttattttataattttgttcaaaacaagtttccattcctgtgtaaagaattactgcataagtcaatatccaatgtcagtaacctttgaaatcccaatacactgttggtgcactatttagagtataatcctgaaggaaacttcccctggtacaagttggatttactgaatgcaagaatggctcaatattactttggtagcagaaaaactcattaactcatccaataggaggagaaaatactacagcatttatcaatgaaattattgaagtatattactctgtttctagactgttaaacatgaaatactaacaggtaataaaacaatatagatagaaactcaattattggtaatttttgatcagtcagaaatcaatatgttaatgtacaagttatgtgaaactattagcagggtagtgtaatttgtaaaatacattaaaacagaagaaatatctgcaaaatggaatctggagaacacaaaatcttgagcattatggatgttgaaatcatagtaaagtgaacttttacaactcaatagcaaaaaataactcctaaaacaagaaagtaatagatcaattttaaaatgggttaaaggcttgaatagcattactccaaagaagacattcaaatgcccaacaggtgtataaaaacatgctccatgtcattgattctgcagaaaatacaagtcgaaaccagagtgaagcatcacttcacacctcttataattactattagcaaaaacccaaaacagcaagtgtggcaaagaggcagagaaattgtaactcttatacgctgtggctgaaaatgcaaaatggtgctgtctatatggaaaatgatacagatgttcctcagaaaaattaaaatgaagccagatgtggtgcacgcctgcagacctgcagttactcagggaaactctgtctctaaaataaaataaaataataaaataaaatagtgacaattaccatatgatccagccttcccacttctgagtatatagcaaaataactgaaatcaggacctcagagatatcagaacttccatggtcattgcagcaccgctcacaatagcttggatgtggaaacgacctaactatccattgaatgatgaatggacgaaaaaaatgggatgtgtgaatatacagtggaacattattcagcctttagaaagaaggaaattctgcaagagatgacgacatggataaatcttaaggacgttatgctaagtaagtaaggcggtcagtgaaggacaaatactgcatgattcacttgtgtgtgtaatctgaaatagcctcatagaatgagagagtaggataggccgggcaccgtggctcatgcctgtaatcccagcactttgggaggtcgaggtcggtggatcacctgaggtcaggagttcgaaaccagcctggccaacgtgatggaaccctgtctctactaaaaaaagtgcaaaaattagccaggcatggtggcatacatctgtaatcctagctactcgggaggctgaggcaggagaatagcttgaacccgggaggcggaggttgcagtgagccaaaatcacacactccatctggggcaaaaagagcaaaactatctcaaaaaaaaaaaaaattaaagagttatgcagaatatttttgaccaggaaaaataacacaagatacagttgatcctgactactgctgtttgcaactcttaatagtaaagttacccttcccttaaatgctacttccctaacctcaagagggaaagcagcctcaccataatcctaagagcacagaggttttccgtggaggacaatcactgtctccattaagcgcatcatttatacagagttagatttcttaaaaaacaattttattctggaaatgatttcagatatatggtttctgcacaggataaggtaatttttctagctctatcctactcttcattataatcatggaggcagtataagcatattattaaaaatactgtaaatgtactgtgtgattcttatgaggtgtgtgaacaacatatatatttatttactacaatccttgagcaccataaatcttatttaattattactggaattattcaccaactctcatcctaagtgaagattttattaagttaccttcgttttgtttggtttctgagatggagtctagtattgtcacccaggctggactgcagaggtgtgatctcagctcactgcaacctccgtctcccgggttcaagtgattctcctatctcagcctcccaagtagctgggattacaggcgccagccatcacacccagctaatttttgtatttttagtagagatggggtttcgccatgttggtcaggctggtctcaaactcctgaactcgagtgatgtgcccgcctcagcctcccaaagtgttgggattacaggtgtgagccaccgtgctcgtccggattttattatgatagctttgtatccatcagggattggtataaggtttaggcctctcatctctctttattgactcagcccataagagagtaattattcctcctccctgtctggctttgctactgactttgtttctacaaaagagaaatccctttccagacatgaccacttggacttcttttcttgcagattctgcctgccagactgaaacacaaaaatactcacctgattccttcccactgccaggacagcccagtttgtgtgacggtcataacagcactgtgtgggaaggaggcagccagaccctgagataaaggtttgtgagtctgtgacctcatcttccctcagaagtgcaattataattttacctgtagcagcaatgacagctgacttagggagttgataactttttgaaaaactttttgcagttgctaattaccagaggcaattacaactttctcataaatgtctccaaagagaccactgaagtatccaaaagaggctcttactttttcacaatccctgaagactgcaaggagcagaaaatattgaggtttgatctgtgaggcacttgtagagaagcatgtttgtctcactggatttcctaattctatgagatactcttcttcctaaaatcaagctcatccttaatttgcagatccattatgtaagtattcagcaggtaactggaatcagataaaggatctagaatggattaataaaaaatgagataaatgtgagagaaaagcatggagtaatttgcattagaaatcgctggactcatttgtataattaaatgtaaattaatttagaaatgataatatggacacgttctaggaaatatactttactattgtgacctcagcagtgacagaaaaagtctggacataaaaatattctaaagagaaagatgtgaaaaaaaaaaagtctctcacaaataaaacacaaggatcacatgatttaacagccaaattctaccattctttttttttttttttttgagttgaagtcttcctctgttgcccaagctggagtgcagtggcgcaatctcggctcactgccacctccacctccccggttcaagcaattcccctgccttagcctctcaagtagctaggattacaggtgcatgccaccacacctggctaatttttttatatttttagtacagatggggtttcaccatgttggccagactggtcttgaacttctgacctcaggtgatccgcccacctcagcttcccaaagtgctgggattgcaggcgtgagccaccatgcccagccattcttttaattattagataaacctaggctatcttctcaattgaacagcagtagataggaaatttctctacatttaccattcctgaatttttagtaaaaagcactaaccagttatgccattaatttggaagtttaaaatagaagagccgaaaatgaaactttggtttcccaacacacaaatccacaatttgacctaagtccactctccattctcctaggagacatttgaggtaaactgagaagttacaggaaacatagtccacacaagaccacactcacttcagatgcccactgcaatttcagtgcttccccaaatcaccctaaagttggacaattcactggaagaactcatggaactccctgaaagctgccatgctcacagttacagtttattacatgaaaaagatccagggtagcatcagccaagggaagaagcagtcagggcagagtccaggataagcaccacatttggagcttccatttgtcttctccctgcagagtcataggtgaattcctttccaggaaccaatacacgacaacacctatgggatattgccaaccagggaagctcattcaagccctagtgcccagagttttactgaggtgtgatcacatactctccatagctgaccattagtttccagcccctcccagtgtccagccttatatatagatttacagttcctccagagttcagaattgatatggtatatccaaagccctaataaaaaatcaaaacgtatggccaggcgcggtggctcatgcctgtaaccccaacactttgggaggccgaggtgggtggatcacgaggtcaagagatcgagaccatcctggccaacatggtgaaaccccatctctcctaaaaatacaaaaattagctgggcatggtggcgcatgcctgtagtcccagctactcaggaggctgaagcaagagaatcgcttgaacctggaaggcggaggttgcagtgagccgaaattgcaccactgcactctatctcagaaaaaaaaaaaacaaacaaacttagtgttcaggaaacaagtctgaaagtaaacggagatactcctactagacatggcattttaagagcacggacaccactccctaagcacttgggggttacaggatgcagtgtgtttaaagggctctgctgggtttcagtgtagcatgagacagagtgtgcaaggaagttaagggaactgcacacattctgctctgagggactacggggtgcagtggttatggggataaaagggataatggagaggggacactaggcagaaatgagggatgggcaggggtgggtaaaacaaccaggaaggtttatgtccatcagggttaaagacacaaggagagaaagcatatatgtgggataagatttaaatatttttttcaaagaaagacacaagacagtgacacttggaaagaagaaaggcagaattctgttagttacagcttcaaaggacagaaaaatgtcaaaagagccacgcagggcgttgcaccaagggctaagtaacagcacgctggagcagtaggggggcttatgatgagtgtcggagctggaggctgagctagtgttacatgacgccttgtgagttggctatgttgaattatttcatggactctgggccaaagcagctgtccctggtaagctggtacatagctctatggggattagggtacatcgtggctttagggtgtggacacaatcagctgctcaataaggggaactagccaaccctagccagtaactcacatctgtgtcaagacaggattacaaataaaaggaaaaaaatctgctttaaaatctaataatgggatatggatgtcctcagagtagttaatattccaagacagagacagaggccaggagggggagctccagcctaacaggggagataagtaacacggtgatatgatgaataagatgctaagggctgggcgcggtggctcacgactgtaatccctgcattttgggaggcggaggcgagcagatcacctgaggtcaggagttcaagaccagcctgaccaacatggagaaaccctgtctctactaaaaatacaaaattagccgggcgtggtggcgcatgcctgtaatcccagcactttgggaggccgaggcaggtggatcacgtggtcagaagtttgagaccagcctggccaatatggtgaaaccccatctctactaaaactacaaaaattagcagggcatggggtgggcgcctgtactcccaacaactccagaggctgaggcaggagaatcgcttgaacccgggaggtggaggttgcagtgagcagagattgtgccactgtactccagactgggcgatagagcaagactcggtctcaaaaaaaaaaaaaaaaagaaaagaaaaaagaaagaaaaaagaaaatgtagaaggtttgggtggatgggggtggggcaggtgtcagtaaaggggttatagaaggatgggacagagagaagattaggggatgaataagccctaaacggcagtgggatgatggtcaaggtatggatagtggtggatgggattacatcttcaaagtctttatttctataaaggtcgtgtgctgaggtactgggggttaagatttcaacatgaattgggtgggggaacacaattcaacccatagcagaaagtgcatgttgatgccataaaaggcatattctcaaaatgtagatgagatatttcaagataatgagaagggggcttagaggagaagagaagaaaatccttctttcctaggccaatgtggagtaccaggtgagatgctgtgtcctctcttcctcaggaaatgccatgtctttagaatttgaagctctttactgatttctgcttctgagatactgagcctagaatagaatatgttagttgtgtgtacgatattgagcctagaacattatatgttagttgtgtgtgtgtgtgtgtgtgtgtgtgtgtgtgtgcgtgtgtgtagacagagagcaacttcagatccaatttcagattgaatatgtattcaatcctcagagggagaatacaccttaataccaaaaattgttccttctggagatccaaatagtatcagtcatggattattaatgaacaatttgcctttaatttattatttaaatattttcccattaaatttgtatctatgtatattcctttttttttttttttttttttttgagatagagtctccctctgtcacccaggctggagtgcagtggcatgatctcggctcactgcaatctctgcctcctgggttcaagggattctcctgcctcagcttcctgagtagctggtattgcaggcgcaccaccatgcctggataattttggttgtatttttagtagaggtggggtttcaccatattgaccaggctggtctcgaattcctgacctcaggtgatccgcctgcctcagcctcccaaagtgctgggataacaggcatgagccaccgtgcctggcctagtactatttttacatagtatatactatgtgttatcatacgtaaatatcctgaagttcattaagataagcatgcacatcgcattcttgatattatataatacatattatattaattcattatgacagttcattttatgtgtctgcttgactaggccaaggaatgtgcagatggaacatcatttctgagggcgtctgtgaggatgattccagatgagataagcattcaaatcgatgttctcagctgagaggattgccctccctagtgtccctgggcatcatccaatcagttgaaggcttggatagaacaaaaggtagaggaaagaagaatttacctctttttcctcctgccttcctgcttgagctgggacattgatcttttcctcctttggtctaggactggcaccacggacttcctggttctcaggcctttgggctcaaactggaattacaacactggcttttgttggtctccaccttgcagatggcagattgtgagacttctccataatctcatgagccaattcctcataataatatttttcatatatctatgtacacacacacaactactgtttctgtttctctggagaaccctatgtgtgcaattatgcacacattttttgtctcctatgcatattctttatttttctttaagagatggggtcttactttgtcaccccaggctgaagcacaaaagtgtgatcatagcccactgcagcctccacctcctgggctcaagtgattctcctacctcaacctcctgagtagctggggctacaggtgcatgccgctgggcctcactgatttaaatttttttttcttgtagagaggggtctccctgtgttgcccaggctggtcttgaactcctgggctcaagtgatccacccacttcagcctcccaaagtgctgggattacaggcttgagccacagcacccagcctcttatgaatagtctttttttttttaaacttttattttaggttcgggggtaaatatggaggtttgttacataggtaaacttgtataatgggggtttgttatacagattatttcatcacttaggtactaagcatagtacctgatcagtatttttttctggtcctctccctcctcccagcctccatcctcaagtaagctccggtgtctgttgttcattcccctccatctgtccatgtgttctcatcatttagctcccacttataagtgagaatatgtggtatttgattttctcttcctgcattagtttgctaaagataatggcctccagctccatccatgtccctgcaaaggacatgatctcattcttttttgtggctgcatagtattccatggtgtatatgtaccacattttctttatccagtaccattgatgggcatttaggttgattccatgtctgttattgtgagtagtgctgcaatgagtatataggtgtgtgtgtctttatgggagaatgatttatatttctttgggtagatactcagttatggggttgctaggtcaaatggtagttctgtttttagctctttgaggaattgccacactgctttccacaatggctggactaatttacactctcactaagtgtataagtgctcccttttctccacaacctcaccagcatctgttatttttttgactttttagtaagagccatctgactggtgtgatgattgtggctttgatttgcatttctctaatgatcagtgatattgagctttttttcatatgatcattggctgtatgtatgtctgcttttacatgtatgtcatcttttacagctaattaatgagtgcaggaatgttgcaaggtgcaaagtcaacataaaaattagttgcatttgtacatactaacaatacactgtctgcaaaggaaataaacaatctcattacagtagcaccaaaaatacttgaaaatgaatttaaacacgtgggtgaaatatctgcacccttaaaactataagacattgatggaagaaattggagaagacataagtaaatgaaaatacatcccatgttaatggatttgcagattcagtatttctaaaaggtctatagtataatgagtgatctacagattcagttcaattcctataaaaatatcgatcgtatttatcacactaatgaataaccaatcctaagattcatatggcaacagaaaaagaactttctactgagaaatcacaagacctacaaattcagatgggagaaatcatttcttataaagggttacaggctacaaggtggccattctgacagactgggaagtgtaaattccagtagagctcccagtggaaaagaaatttatgctgaacgagttggccaagtatacatattcaacaggtaacaggatgagctatgactattcatgcacggggccccaacgcatgcattttgaacaaacatgcatgctacctgtgtctcatgctaaccttgagatggaggttgaacatttaaatgtattgcaattaggccctacaagtcaaaaggtgaaggtgctctgtgtgcagcctctgtaaaacccaccagaagcagtccatggttggtggtctcttatcaggagaatgttaccaaaatcagtctcttgtccaatcaaagctatagttatggcttgtggaacacggggctctgggtcagtatctggtgatggatatactgcaattgttttaatattgcttgttttgaggccaatgcactttatttttgctgctagagaaaaagaacaaccgtatggcagttagaacatagtttattctttaagtgtaggggtgtgtgacttaacccttgcctggtgtggctttaggtcttgttcataatttggtatctcattgccccaaagaatccattctgttggtcttgtgatctcgatttatttatttatttatttatttatttttgagatggagtcttgctctgttgcccaggctggagtgtagtggcttgatctcggctcactgcaacctctgcctcccgggttcaagcgattctcctacttcagcctcctaagtagctgggactacaggcgtgcgccaccacacctaatttttgtatttttagtagagatgggggtttcactatgttgcccaggctggtctcaaattcctgaccttgtgatccacccgcctcggcctccccaagtgctgggattacaggtgtgagccactgggcctagccatgatttctattttaacattaatgttggtcagttgttgtgtttacgccacaaaaggagggtataacgaaatatctaacctcccatcctgtcttggcctgaactcagtttttgttgttgttgttgttgttttctgtttttcttgagacggagtctcactctgtcgcccaggctggaatgtaggggtgcgatctcggctcactgcaacctctgcctcccgggttcaagtgattctcctacttcagcctcctgagttagctgggattacaggcgtgcaccaccacgcctggctaattttttgtatttttagtagagatagggtttcaccgtgttggtcaggctggtctcgaactcctgacctcgtgatccaacctcccaaagtgctgggattacaggcgtgagccactgtgcccagcctagaactcagtttttaaggttcctctggggtccccttggccacaggtggttggagcgcttaggattttatttttagctctcagaacccaaatagccaaagcaatcttgatcaagaagaacaaggctggacaacaatcccaccacggctcaggaaagcagccagggcagatggactctaagtgagtttcacttgcactgaaggcttaaggaaggacctagagagcaagctaccctgggtttcataccctggggtcacatgaacaatgggctaaagcattgaaggatatccagtgtctagcaaagactgaaacagaacccaggctgttccagccagcccctccctatctcaggaagctccatttccagaacactctacagttattcttgagaactatagcaagaaagggaggagaactgggtcagtccatgatcacttgaagaactatccattggttacttctgtgattatgttatgttacatggtaaaagggattttgcgattgtaatgaaggttactgcccagctatttatttatttatttatttatttatagagacggagtcttgctctgttgccaggctggagtgttatggcgccatcttggctcactgcaacctctgactccctggttcaagcaattctcctgcctcagcctcctgagtagctgggattacaggcacatcccactacgcctggctaatttttgtatttttagtagatctggagtttcaccatgttggccaggatggtctcaatctcctgacctcaagatctgcccgcctcggcctcccaaagtgctgggattacaggcgtgagccaccatgcccggcctgcccagctgtttttaagacaggaagatagccctggattatctggtagacccagtgtcagtcccaattacatgagcccttaaagagggagaataagacagagagatgcagcagaagaggaagtcagagataagcaacatcagaggggtggtatacattattgctggtattgaatatggtatggatatacctgcacaaagaaactctcagaagtaaataaatttttgccaacaatctaaaagatcttgaaagtggattgtttgtctcccagtgtctcgagatgagagcccaggctggctgatccttgatccagcctttttacaccctgatcagtgtatccggccaggccttgagatttctgatccaaaaacagcaaaacaataaatgggtgtcatattaagttgctatgtttgtggtaagttacattcttcctataaaacaaatttaatgctaaaatatttaaataataaaaataaagatacattgttcattaataccatgactgatactgtttggatctccaaaaatagctattttcttttcctttgagacagagtctgcctctgtcacccaggctggaatgcagtggcaccatctcggctcactgcaacctccgcctcccaggttcaagcgattctcatgcctcagcctcttgaagtttctcactgtctacacacacacacacacacacacacacacacacacccataacataatctgttctaggctcagtatctcaaaaacagaaaggtaaatatcttcaaattataaagacatatcatttcgtgaggaagagaggacacagcatctcccctgggactccacattggcctgagaaagaaggattttcttctctttccttctaagcctctttctcagtatcttgaaaaatcacagttgcattttgagaacaagcctttttaaaaaaatgttatcaacctgcatcttctgctgtgggttgaattgtgtctccccaaaattcgtatattgaaatcttaggacaggcatggtggctcatgcctgtaatcccagcactttgggaggccgaggtgggtggatcacctgaggtcaggagttctagactagcctggccaacatggtaaaaccccgtctctactaaaaatacaaaaattagctgggcatagtggtgtgcgcctgtaatcccagctactagggaggctgaggcaggagaatcacttgaacccaggaggcggaggtggcagtgagccgagattgtgccactgcaatgcaacctgggtgacagagcaagggaaagaagaaagagagagagggagaaggaaggaagggagggagggagggagggaaagaaggaaggaaggaaagagaaagaaagaaggaaagaaagaaaggaagaaagaacgaaagaaagaaagaaaagaaagaaagaaaagagaaggaaagaaatcttaacccccagtacctcagcatgtggccttatttggaaatagggtctttgcagatgtatctccatcccccaatctccataatgcttctttgtccacctgaataacccccccttgatgtccaccccactgccttttaggtctttattcgtcccctagtcctctccttgtcccatcactctccaacccatttgtctatatctgttcccctgccccctcatccatccaaaccttctagatattcttaccccacctaaattcaacaccaatttggattccttcctctgtcaactttatgccctgcacaattacggggatctcagcccaacagtcccccacccttttaggaccgtcacacccttcctcttgacttctagtttctcccattcttgtgcccatggctcaatttccacattctccatgtcttctcccttgaaatcccagatctcaatcataggttgccatcagctccctctgtccctcacccttcagcatcctcaagtccaccatcctcaccaccttattaatcaccagaaatcatttcgtctccccgtgtccattatctctcctgcaaggcttgagctccccctcctggcctctgtctctctcttggaatattaacaacccccaggacatctgcactccaccgtaagaccttttttttttttttttttttttttttttgagacagagtctcgctctattgccaggctggagtgcagtggtgcaattttggctcaccacaatctccgcctcccgggttcaagccattctcatgcctcagcctcccgagtagctaggattgcaggcatgtgccaccatgcccatctaatttttatatttttcacagtgatggggttttgtgatgctgcccaggctggtctcaaactcctgacttcaggtgatctgcctgcctcagcctcccaaagtgctgggattacaggtgtgagccaccgtgcccgaccagattttacagtatcctttttggttaatgctgccttgactcagatttgagatactggctagagttggccagttcccctaattgagtagctgtttaagtctacacccccaggccactatgtacccattttaatcctctcagggctatgtaccatgtaacctgccacgatccctggtggactgaacaaaaggggcaaacgcaggaataaaagacaaagagagtatatttggaaaagggggaaacttgcctctagtggaaaaggctctgagctttttcagccctccaaatttattaggtaaaagagataacgagaaagagaggatgattattgggtaattgtcagtcggcaattttggttcacagcaggcttgagagactgcatccttcaaaccataggtgctagatttcccagtagataacttcaaggagcccggcaccagggagtgatggccctcagcaaacctcctggtggcaggtgcagtcatgagttttctcacgtcctgtaatcatgataaacactttgctgtttgatcatatagcctccagtggaatgctgagttggtcacaatccctttggccttttcggctcccaaacagtaccagattactaggtacagccactttgccttgaagcccttgaaatggttcaacttagccaactcacagggtgtcctgcaacactagctcagcctctcgctctgcttgccctcataagccccggtactgctccagcttgctgttacctgacccttgctgcaatgccctccatggctcttctgacatttttctgtcctttggagctgtaggtagcagaatactgcctttcctctttccaaatgtcactgtcttgtgtcttttcatgaaaagaatctttaaatcttattcaacatatacacatctccatcctccatgttctttaagcatctgtggactttatctctcctgggtgttttacccactccgctccatcacttacttctgcctatggtcccctctccattattcctttattcccatgcccactgcatccctcagttcctcagagttcactgtgtgttattccctaacttccttgcacactttgtcccatagtgtcctgaaaacccgcagtgccctttaaacacattgcatcctttagccgcaagtgcatagggagcggatctccgtgcccttaaaaagccgtgcctgatacgagtgcctctgtttgcttgcaggcttacctactgaacactaacactgtgatttttgattagcgatttggataaaccatatgaattccaaattctggaggaactgtgcaaggctggacagtgaggaggggctggagatgaaaggtcaaccatgcaaagtatttgaccacattccactataactctgggcaccaaggcttgaatgagcttccctggttggtaatattccataagtaccatcatttattgatgctgggaaagtaatgcttccatgactgcagggagaggacaacaggaaactccagatatggtgcttttcctaaattctgccccatctgcttcttcccttgtggatgttaacctgtatttttccctgtaatatactgtaaccatgagcgtaacagctttcagggagttccgtgagttcttccagtgaatcatccaactatagagtgacttggggaaattctgaacttccagttggtgtctgaagtgagtgtggtcttgtgtggactgtgtttcctgtaacttctcagttggcctcaaatatttcctagaagaatggagagtgcacctaggtcaaattgtggatttgtgtgttgagaaatcaaagtttcactttggactcttatattttatttattttctttgttttttctgagacggagtcttactccatcgcccaggctggagtgcagtggcggatctgggctcactgcaacctccgcctcctgggtttaagcgattctcctgcctcagcttcccgagtagctgggacttgacaggcgcccgccaccatgcctggctaatttttgtatttttagtagggatggggtttcaccatgttggctaggctggtcttgaactcctgacctcgtgatccacccacctcagcctcccaaagtgctgggatgacaagcatgagccactgtgcctggccctattttctttttttcttaagactaatcaagtgcagtagtgacaagggggaaagagtagaataaggagttccatctgtaactgactgtgaacaatccattgagataactgactatcttcggacctggctcttacattttcacttcccaattgattacataacggatgagtgcttctttctagaaattgaggaacagtgtatatagagagttctggtaactatctactgctgttctacctattaaataatgcagtaagcagcagatggttacctattatctaattttacctattataaatatctaataggtaaaagaatggcagaatttgcctgtcaaatcatgtgaattggtactttatttttgatgggcattttattcagcatctttctttttaaaatattttcttaatttttaaatttgttatatataaattatataatatataacataaattttatacacacacacacacatacacacacacacacacatatatatatatatatatatataattttctttttaaagacagagtctcactctgtcacccagactggagtgcagtggcacaatctcagctcactgcaactttcgcctccctggtccaagcaattctcatgcctcagcctcccaagtagctgagattacaggtgtgaaccaccatacctggctaatttttgtatttttaggagtgacgggtttcaccatgttggccaggctggtctcgaactcctgacctcaagtgatccacctacctccacctctcaaagtgctgaaattacaggtgtgagccaccacacccagccttattttttatttgtattattatttttgagatgggctccggctctgtcacccaggctagagtgcagtagcacaatctcagctcactgcaacctctgccccccaggctcaagcgattctcatgtctcagcctcctgacctcctgagctgggactacagacacatgccaccatgcccagctaatttttttgtatttttggtagagatggggttttgcaatgttgcccaggctggtctcaaattcctgagctcaagcgatcagcacgccttccagagtgctggggattacaggcatgagccactgcctccggccaagaatattttcatgtttagactttttctatcactgttggggtcaaaacaggaaagtatattttcctacaaaacgtccatatcatcatttctaaattaatttctgtttatacaaataagtccaatgatttctaatgcaaattattgacatcatgtttttcttttgcacttatttcatttcttattattaatccattttagattctttctctgattccatttacttgctgaatacttaaataatggagcagcttaggattctggaaattaacagtgaacttgattttaggaaaaatatctcagagaagtagggaatccagtgagataaaggtgcttctctgccaattcctcaggcatcagacctcaatattttctgctgcttaaagccttcaggaatcttgaaaagtaaaagccccttttgtatactttaatgatctctttgaagacaggagaaagttgtaattgcctttggtaattgcaactggaaaaaaaagtttttcaaaaatgttactgtctcccaaagtctgcactgttattgctgcaccaggtgaaatgataattgcagttctaaggtgaggtgaggtcacaggatcacaaaactttatgtcagggtctggtggcctccctcccatatttgcacaagttgttgtaatcttcacactgaaccaaccactctggcagtgggaagaagttaggtgagtatatttgtttttcagccagagaggtagaatctgcaagaaaagaagtcttagggccaggcatggtggctcacacctgtcatcccagcactttgtgaggccaaggcggggggtcacctaaggtaaagagttcgagaccagcctggccaacatggtgaaaacccgtctctactaaaaatacaaaaaattagccaggcgtggtggtgggcacctgtaatcccagctacttgggagactgaggcaggagaatcgcttgaatccaggaggtggaggttgcagtgagccgagattgtgccattgcactccagcctgggtgacactagcaagactctctcaaaaaaagaagaaaaaaagaagtcttagtaattgattatgtccagaaaaggggttcctctgaggtagaaacagaaccagtgctaaagacagacaaagaggaggaataattccttatgtataagctgagccagtgaagaaagatgacagtcctaaaccctacaccaatccctgatggatacaaaggtatcttaacaaaatcctcacttgggatgatggttggtgaataattccagtgataattaaataagatttatggtgctcaaggattgtagtaaataaatatatgtgttgttcatatacctcccaggaatcatacagtaaattcataatatttttaataatatgcttgtactgcctccatgattataatgaagagtaggatggatctagaaaaattaccttatcctgtgcagaaaccatacatctgaaatcatttctggaataaaataatttgtttttttaagaaaccttgctctgtataaatgatgcgcttaatggagacagtgattgtcctccacagaaaacctctgtgctcttaggattatggtgaggctgctttccctcttgaagttagggaagtagcatttaagggaaacgtagctttactattaagaatttcaaacagcacttgtcagggtcaacggtatcttgtgttatttttctctggtcaaaaacgctctctataactttaaaattttttgattttattgtagtgagattacttacaatgagaactatcctcttaacaaatatcttagtgtacattatagcactgttacctataggtccaatgctgtgcaggggatctctggaagttattcatcttgttttcctgagacttcttgcctctgaattagcaactcttcattaacccctccccgcactccctggcagcctccgtcctactctctcgttctatgaggctatttcagattacacatacaagtgagataatgcagtatttgtccttcactgactgccttacttacctagcacagtatccctacggttcatctatgttgtcatctcctgcagaatttccttcttcctaaaggttgaataatattccattgtgtatttatacaccaagttttcctcacccattcatcattccacggacagttcggtgggggctattgtgagcagtgctgcaatgagcatggaagttctaatatctcttggaggtcctgacttcaattcttttgctaaatactcagaagtgggaaagctggatcatatggtagttcttattttattttgttgtttttttttttagagatggagtcttggtatgtttcccaggctggcctcaaactcctaggctcaagctatcctcttgcctccgtcccctgcataattgggtctgcaagcatgcaccacctcatgtggcctcattttaattttttgattaatgtctatattgttttccctacaggcagcaccatcttacatttccagccacagtatccaagggttccaatttctctgcatctttgccataccggctgtttttgctaatagtgattgtaacaggtgggaagtcatacctcattgtggtttttacttgtgttttctacataatcagtgacattgagcatgtttttatataactgttgggcatttgaatgtctcctttataataatgtctattcagatctttagcccatttttaaattaggtctatttttgttttgttttgttttaggagttattttttgctattgagttgtagaagttcatttccctatgatttcaacatcaataatgctcaagattttatggtctctggattccgtttttacatatttcttctattttattgtattttacaaattatatttccctgctaatagcttcgcatgacttgtacattaatatattgatgagtaaatgatcaaaaattagtaataattgagtttctataccgttttaatacatgttagtatttcatgtataaaagtttagaaacagagtaatattgttcaatgattcatttgatagataccattgtacgttttctcctgttgggtgagtaaatgagtctttctgctaccaaactaatattgagccattcttgcattcagtaaatccaacttgcatgtgaggaagtttcctttaggattttaatcagtgcaccgacagttcattagtatatcaaaagttattgacattggatattgacctatacagtaaatctttacacagaaacaaaaacttgctttgatcaaaattataaaagaaaataccagtgatgagaaatcagtggcatggtaaacagacaaaactaactaggcctagattttttaaaaacacagctgcctgatttgttagcgtagcaagtccttaggttgttgtctttgcaaccaccctagtcaaattcgagtctcttttcaaccctgaagatgcctgtgaattttgacaaatcattgaacctctctgtatctaagttcttcttgtctctacaaggaaaattatgccagtgaatccatcatacagttacaaaaatcaaagaaggtaccatacataccacatgataggcacgattcctatattgtaagtgctatttaaatgttatacattcaaccctagaaagtctctcagcaaaacaaaactttcaacatttttcggtagaatactgtttttcagttatgtcattaatgcaatctacacctcgtgttttctgcaggatcttctggctctcaagacgaatgtcaatcactaggaactggcagagtggcctccagggataggaggaatggtctatttatcacagaatattgttggaatcctgaaaaatttctgtcttccttaccattgtgccttcttttatttagcagggtgcagattgaggtccacagatttgaatcagaaacacctgattatagccacttcttgctcattctgtttaaaggtgtccccaagacacacctctgtatgcagcaccaagtcaatggcagattttaggtgatataacttcctaaatgatttcagattccaatttgtttctgtcctcacagagttggtagggtatgaccgttggcaccacctgtgtctgcagtgtttcaagccatcatgataagccccaggaactacaggtgtgtagaatttaaaatgaattatccaatgtatattgggctttccatttttctctgctggaccctgatacattgataaatacgattttttccagccgggtgcagtgtctcacacctgtaaccccagcactttgggaggccgaggtaggcagatcacttgaggccaggagctggagaccagcctggcccacatggcgaaaccccatctctactaaaaatatgaaaattaaccaggcgtggtggtgcaggcctgtaatcccaactacctgggaggctgagacacaggaattacttgaacccgggaggtgtaggttgtagtgcgccgagatcgtggcactgcactccagcctgggtgacagagtgagactatctcaaaataaaaaaaaaaaaaaggatttttcccatgtttataattgccagatatagcagcaaaaacatcacaaagaaaacaagataggatacttttctgctgtattcatgacaaaatcaaatcagagggtcaatatctacaacattgttattattccctaatatttcctgtgtttcttaatctgtgcctgtggctctataagttttctcctgtacagacacaagtggaagctcattcatgaccttagcaccaatattccctacccccaccaaaattattttaactccttttggtcttatgtatttttatcaaattaaagagccatcacaggttataaatcacagctcattggaattttgcaaacaaacatagctctttatgtaatacatagatacaaaaacagaacactgttctgttcacaagagttcacaagaagctccttctttgcactctaagtcactacctacaacagtataattctgttgtttctatttgcaggagtgtaactcttgagattttggtttacatctcttccagtatttaaaggattaaattattttggcctgtttgctactttatataaatggaatcaacatgaattcttttatatttagcttttatatctattccattagaatttttgtgtgtgaccataccttaattattgcattctattaatggtactcattagcattgcttcctatgattccattgtatgaataatcagatgatcgagtcatactatttttttgtttgttttttacttttgtttgtttgtttttgagatagagtcttgctcttgtcacccatgctgaagggcaatggcgtgatctcggctcactgcaacctccgcctcccgggttcaagtgattctcctgcctcagcctcctgagtagctgggattacaggcacccgccacaacacccagctaatttttttgtgtgtttttggtagagatgggttttcaccatgttggccaggctggtgtcgaactcctgacctcaagtgatccgcccaccttggcctcccaaagtgctgagattacaggcatgagccaccgcgcccggttgagtcatactattgttaaaggccatgtggtaattttgagtttgtggcttttatgagcaatgaatagtcctacctatataaactatgtaacttatcttttgttgatatatatatgaatttgtgatggataaattcatagaagtgaaattattgaagcataaattgacatctggtaggcttatgtagctgctaccaaacagttttccaaaatgtttgtatccatttcagcacccaccagcagcgcatgagttcttggtttattcacaaccttgccacacttaatatttcctgtcattttcttttttcttttttctttttttttttgagacagaatcccattctgtcgcccaggctggggtgcaatggtatgttctcagctcactgcaacctctgcctcctgggttcaagggattctcctgcctcagcctccctagtagctgggattacaggcgcacgccaccacgcctggctaatttttgtattttttgtagagatggggtttcaccatggtggtcttgaactcctgacctcaggtgatccacctgccttggcctcccaaagtatgggattacaggcgtgagccacagtgccctgcctaattttttgaattagctgaaattttcttttggccaatattaaggtcactggtgaatattctatgcatgccttatagggataaatacgaaataaaaatgagagcctgcattcctcctttgaaaatatggcaaggcatttctcttcctcctctttttgtcagaatatttaccttagaaaacttgtgagtactttctcccgaaatgtttatttttagaaactaaataaaccttttgtcagcataatgacctagggatatctttctcaaggacttgggagacatctctttcaaatgtcaacatcactagagatagcacctgtatctctctgtttctgtgggttggtaggagcctatctacagtgggtacctggctccattttgtaaaactaccacctgttgtaaacatataagttagggttttcccccctgcttctgaataaagctaattggctaacatagatggtctccccaattaccatgtaaggtcaggatgaacaatgtataagcaatagcgcaatcaagtttttgaggctaatcagtgcttatctcaaaaaccagtctataatgggttgtatagaaattattctttttcctatctcctaacggattgcctctattgcgtatgatattcctgttaaatgtttattcatcaataaaattgttggccaggtgcagtggctcacacctgtaatcccactttgggaggccgaggtaggaggatcacttgaggtcaggagtttgggaccagcctggtcaacatggtgaaaccctatctctgctaaaaatacaaaaacttagctgagtgtggtggcacgcgcctgtaatcccagctactcagaaggctgaggcaggagaatcacttgaacctgggaggcggaggttgcagtgagccgagattgtgccactgcactccagcctgggtgacagagcgagatcctgtcaaaaaaaaacaaaaaccaaaaatgtccatgctgatcccttgaaaattttagaagcaacaaactccccatatacataatgggtttataactttaagctataatcagcttatcctctactttttagtttcatgaaaagctctgcaatcaactcatttctttgcttcagatcataaaagtcaatgctaaaagttgtttcgtggcaacatagctatttagcaatattgtgtaatatagacatctatcttgtacagatcccaaaatctatcccagatactgcatcttcaaaaaataatgctgacctaggccaccatggagtgtgcctggagtcctagctacttaagtggctgaggcaagaggatgtcttgagcccaggagtacatatgcagcctggaaaacacagttagaccctgtctctaaaaaataataataataatcgaagtaaaatatgctgatatgggccgggtgcggtggctcgcgcctgtaatcccagtgctttgggaggccaaggtgggcggatcacgaagtcgggagttcgagaccagcctggccaacatggtgaaaccccgtctctactaaaaatacaaaaaattagctgggcatggtggcaggcgcctgtaatctcagctactcgggaggctgaggcaggagaattgcttgaacccgggaggcagaggttgcagtgagtggaggccatgccacagcacaccagcctgggcaacagagcgagactccaactgaaaaaaataaaaataaaaaatgctgatatgtcatctcgtatccatctttgtgacatatcactatatcctcattttaacctgctaatattttaaatatgttcattttcatatctaaacatgatcatacttcaagatggatgaagggatccaaaaatagggatataaggccgggtgcggtggctcacgcctgtaatcccagcactctgcaggccaaggtgggcagatgatcacctgaggtcaggagtttgagaccaccctggccaacatggcaaaaccccatctctactaaaaatccaaaaattagccaggcgtggtggcacgcgcctgtaatcccagctactcgagagcctgaggcaggagaattgcttgaacccaggaggtggaggttgcagtgagctgagatcgtgccattgcactccagcttggatgacagagttagactctgtcttaagaaaaaaaaagttgggggggtgagatatcagagaaaagcatacttattagtacctgttaattcaaaaatattgccataaaattattgccggcagacgtaaggctatttaaaatttgataatctagttttacttctatcagggttctataaaagaataatcggcctaccaaatacacttagaattactgcagagttattctttagatcaataaatacaattgtcttctgaagactattttaagggctttgttatctacaggggccagtacattgaagaagagaaaacaaacaagatttaagagattataatttttaaaataaaaagtatgtttacttattactttcagaatgcacctaaagtgaatctgaaattacagtatttttagaaaatattgacctaagcctcagcctcccaagtagctgggattataggcgtgtgccatcacgcccggctaatttttgtatttttagtagagacggggtttctccattttggtcaggctggtgtcgaactcctgacctccagtgatacgaccgcctcggcctcccaaagtgctgggattacaggcgtgagcaaccgtgcccggcctctattgcttttttaaaagcaatagctggtgacctgacttctcaccggccttagcactccacgccccagatgtggcccaggaaactctttggaactctctactccagagtgaatggggaatagaaatggagaggatttctatgctattctgtggggcgtcagcgtgaaattacacattctgcacaggttgagtttgcatattgtattttagtttgcattcctttcacagacaatttaagggattttcaattaaatttctaaattttaattgaattccttaattttaattgtgggaactttcctggatccaaacaacagacgttgaccctcctagtgagatcccaggtcacaaaccgtggagcggctccagcctgactggcaagtgtggcttgcaaaacgcggaaaaccgagacacgcccagagataggaggagggaagtgcaggccccgtccaataagtattcaggccccgcccgccacgtcgctggccacgccccggcccggcctctccgttcgcgcgcagccgcctgcagacccggaagtggatggcgtggagatatggcgcaactgcggcgcgtgagttttcctttgtttagattaagtgttcgcttagcggtgccctcacgcttctgtacccgggatgtggggggcggtacagaccttgaaatccccgcaccgctctctccaccccgagtaaattcatgcgtcccgtcagagtgttaaaatcgccctagggctggttctgtctccggtcgttctgccgtagggctgcgtaggcagctgctttcgcgccgttttcctgcttaaaacccttcagtgacccctccgccagccccgcgccacgtaaagtccccgcctgcgaggcggatccacgccctccgggtcccaagcctcgtccttgtcggcccctggggcgcagcgccgcagccgccattcgggaggggccgcgtcctctgcctggtctggggattctgcagaccccacccctgatctgcctgccgccgtagtcctccttgggccgttcccttctgtccccaggccttttcgcagtcacggcttctccggatcctgtgttgggggaggtggccgggacctatctcagggcacccagtgttcttccgtcccaaattcctcccattggaaactgtgctcttgaggaggtgggtattttattccagtcccctccctgtgaatgtgaagtgaaagagagatggagagcgaggtagaggaaacagaaaaatttagagagaaaataatgaggaagatccataacaagacggcaacgcagagggagggtgagagatttgcaaagtgaaagaagcaccccaggaagtagcagggagagaaaagcaactcgagaaatgtagagaaaagttctatttctagacagatgaaggacagcaaggtagggagaggggcagcaaagcgggaggctcctcagacaaagttggggagaggaggagggatttggagccagggcagaccgagcagcgtggtgctggcacagcaagagggggcagccggtgacaaggagggcaaagggagaaccaccccagagatctggggttgccagacagtagggacaagggggcgtgacagagaagagggaatttaacaggaggagcacagatgggagaagaaagaggcagaaatatatggagattggagacaatcaaaagattggagagaaagagcaacaagaggaaaaaaattgcaagatggagcagatgaagtggaaaagaaggaatagagggaagaaggggagaaactgcgggagaggagaggggctcaaaatctcggctcactgcaaccttagcctcctgagttcaagcgattctcctgcctcagccacccgagtagctgggactacaggcgcccgccagctcgcctggccaattttgtatttttagtagagacagggtttcaccgtgttggcctgacgggtcgtgaactcctgagacctcaggtgatctgcccacctcggcctcccatagtgctgggataacaggcttgagccaccttgcccggcctcctcacattttattaatttgctggaatggttcccagaactcagagaaaattttacttaggtttactatcagttataaaggttattacaaaggatacaggtggaagagccatcctagcaaatcaaaatagaggagtgtgttttggaaaccgttaattttatccatatctgaggtgaggggcagtcttgtgggactgagtccttaactgggatctgattctatctccaggtagatactatcaaaattgagttaaattgtgggtcatccagctgggagtgtgccagagaactggtcagtatgcggaaaaacacgtgcacatttccatctcaaccagtaaagggaagagatctccaaccggcccacccacctgtctcagggcctgtgatctctactcagtagtaactgggaatggtctgtccctccccctggctgttgctgaccctgcgattgtgcaccaggtgccagccctactcacagtctcaggacagtgtgacatccttcctctggcatcaccaatatttacttcaagggattactttggttagtgcacccacatggaggtattgtccatgaaaacacacacagacacactggctgggtgcgatggctcacgcctgtaatcccagcactttgggaggccaaggcgggtggatcacttatggccaggagttccagaccagcctggccagcacggtgaaaccccatgtctactaaaaatacaaaaattagctgggtgtggtgacacgtacctgtattcccagttactccggaggctgaggcaggagagtcacttgaacccaggaggtggaggttgcagtgagccgagatggaggttgtagtgagctgagatcatgccaccgcactccagcctgggtgacaagagtgagactgtctcaaaaaaaaaaaaaaaaaaaaagcacagatgaagccttcattttcttgccactcctccatgattaaaataaaaaatattctattaattacatctctccctgtagtgagtacccctcttcaacgctccatttgagaacacagtacactaaaatcttgtttatatttctgtcttcagtcttgcctccagttcttgatttacccccttccaattaagctttcacctccaccattcctttgatccttttttcccagaggtaccagtgatctctgtgtttcgaagtccaattttgaatttcctatcctcatcttttcgtcttagcaacatgttgcacagctgatcattccctgttcttttttcttagctttgaagacatctctaagtttaattactttgtttcagatttttgtgttaccagtttcctctgctggtgtctcctgaagctgtcttctctgaatgtgggagtgtcccatgatttaggtctttttcatttttgtttttgtttttaagacacggtctcagtctgtcacccagactggagtgcagtggtgcaatcatagctccctgcagccttgaactcccgggctcaggaggtcctcctgcctcagcctcccaagtagctgggactctaggtgcataccaccacacctgagtaatttttttattttttagtacagactgggtttccctatgttgaataggcttggatctcaaaactcttctcatctcttttcacacacactacccttccttatcatctcatctcatggctttgaaccccatctacctgtctccatgtgccctgcagacctctgccctgaggtctagaaacctgtgttcagttgtcccctcacttctctgctgggacatctaacaggcatctccaccttcgtatgtgccactttctgaactcccccaaatgcattcccctgcagtcctgcacatctcagatgagggtgaccctgtacttcctggggcttagctgaacttgtcatatgttcaaaatatgtaagatgttacattgtaaatacattaatatatttttttttcgagacggagtcttgctgtgtcaccaggctggagtgcagtggtgtgatcttggctcaccataacctctgcctcccgggttcaagcaattctcctgtctcagcctcccaagtagctgggactacaggcgtgcaccatcacgcccaactaattgtttgcatttttagtagagatggggtttcatcatgctggccaggatggtctcgatctcttgaccttgtgatctgcccgccttggcctcccaaagtgctgggattacaggcatgagccaccatgcccagcctataagtacattaatttataacataaataattacatagttactaaaacagatgaggaaatttgttgtttctgaaattctttggaggtatgggagagaaatgttggtggcctcatccctgtgtgatctgcatcccaggacctctctgagctcatctcctccctgtgtccccctcgttccctctgccgcagccacacagacctctttcctggggccagggttgctcctgcctcagggcttccacctgggctgtccctctgcctggacatctctagcctgtcagctgcaggtgcaaacaccttttcttccccaggtctttgttctgatattaccttcttcatggagggttctgtgttcctctccaccctacatttaacactccagctacacccttacccctactgtggtccacattgcctgctctggatgtttctttctgctcttttgctgtccactacgtaaatcctggtaacaagacccaagggtagagcagagccagaaggtgggggtgtgctgggcttgccccgtctgagtggagctcacccctgttttcacattggagtgcagatacacatcttgtgcccccagcctcttacctgagattcccattcacatactcaggttgggcccagccttaatatttgaagttgattctacagtagtttctccttatctgccagtgtactttttgaggttccagttactcatggtcaaccacagtccaaggtattacgtggaaagttccagaaatgaagaattcacaagttttcaatttctcatccttctgagcaggatgatacaatctctcactgtcccactctgttttgtccaggacttgaatcatctctttgtcctgtatgtccccctgtatagtcatccctcggtatcacgtaggatttgcttccaagatccccccaagactacccaaatcagatgatcttcaagacccttatataaaattgcataatacagtcacatgccacataaggacatttcggtcaacagcagcccacacctgtgatggtggttccataagattacactggagctgaaaaattcccgttgcctagctacctcagagcagtcatgacatcatagtgcagtgcattccttgtatttgtggtgatgctggcggaaacaaacctagtgcgttaccaaacagctttaacctggatgtggaggaggatgacattgagaatctcttagaggtggttcatgaggaatgggttaatgaggagtcattggaactgatacaggaacatgtagctgaagaagaggcaagagaatagggaactggctgggcacggtggctcacatctataatccctgcactttgggaggccgaggcaggtggatcacttgaggtcagtagtgtcaggagtggtggcacatgcctgtggtcccagctacttgggaagctaaggtaggagaatcacttgaacccaggaggtggaggttgcagtgagccaagatcacgccactgcactccagcctgagcgacagagtgagactccatctcaaaaaaaaagaatgagccaataggaaactgaaggagaaaaagaaagtactctcaaggcaattcacagttaaagatatagcagaagcttttgcagaccttgacaagctccttaaaaggtttgaaaacataggcaccaacacctaaagattttcattaatagaaaggagcgtccatgatgcattatccgctcataagaacatttaggaagacaaaagaaacaaagcaagcaaaccaccatggacgtatttctgaaaggagtgacgcctctagaagaggctcaggcaggtccttcaggaggcgtctgggagaaaccattgttaccataggaggactttctggtgggagaagatgtggcactggaagacagtgacactgatggtcctgaccctgtgcaggcctaggctgatgtgtgtgtttgtgtcttagttgttgacaaaaatgtttaaaaaggttaaaaaaaaattaaaaacaagaaaaagtttagagaattaaggtacaaagataaaatatttttgtatagctgtacaacatgtttgtgttttaagctgttattgcaaaagaatcaaaaagttaaatttaaaagtttatacagtaaaacagttggaataagtaagcttagtttattacggaagaaaaaagtattttttgtgaagttagtgcagcctaaatgtgcagtgtttataaagcctgtagtagtgtacagtcatgtcctagaccttcacattcattcatcactcactcactcacccacagcaatttccagtcctccaagctccattcatggtaagtgccctagacaagtgtaccattttttaaactcttataccatatgactactatattttttctttctttttttttttttttttgagacagaatctcactctgtcacccaggccggagtgcagtgcagtggtgtaatcctggctcactgcaacctccgcctcctgggttcaagtgattctcctgcctcagcctcccgagtagctgggattacaggcacccactttcatgcctagctaatttttgtgtttttagtagagacggggtttccccatgttagccaggctggtctcgaactcctgacctcagatgatccacctgccttggtctcccaaagtgttgggattagaggcatgagccgccgtgcctggccttactgtaccttttctatatttagatatgttttgacttacgagtacttaccgttgttacagttgactatagtattcaggacatagcatgccctacaggtttttagcagtaggctgtattatatataccagatgtgtagtaggctatgctatcttggtttgtgtaagttccctctgtaatgaaatggtctgaaaatgcgtttctcagaacatgtccctgttattaagcgatgcgtgactgcatttgcatgtaacctatgcacatcctctgcaccctcccatatactgtaaacatctgattactggtaatacctaattaaatataaatgctatgtaaatgcttgttatactgggttgttttcttgtattatttttattgtattgctattttatattggtatattgcttccttttgtcttttttaaattatttaagtctgtaattggttgaatccatggatacagaccccatgcactgtatactctgtctgcccatcaatctgttaatagtcttcttttttgttttgttttgttttgtttttaatagtagtctttttgatcagatccaattttgtggtacctcattggttttgtttaagtgatccttattttacttaacatgccccccaagcacatgagcattgatgttggcaatttggatatgtcagtgagaatctgtcacaggcatcctttaagtggagtaaatagggttcagtactgttccaagtttcattcactcagggttttgcaacgtatccccttggataaagggattttactgtattctgtatccagcattgagcaccgaagccgtgttctcatttctgaaggctgagttcagcctctgattcacaaagaggtgagggggtgctgtgctctgcatggggtttggtcagagccaggtctgtgccctgaaggggagcttagtccagcccagctccccactgctgcagtgtgtgtgtgggcttctccaggaggggagcgggttctgaagaaaggggccaaaagctcacttgttcttcctgtaggagtttattgtcccggcatcaactctgatgcagtgggcagcagaggaccgtatttccacagggtgaggtcttccctgcgtgtgtggttgtggcacaggaagaaagtatgttgattctaaaccctaaacagcatatttttgacattcaggattgacttctaaagagtcatgttggccgggcgcgggggctcatacctgtaatcccggcactttgggaggccgagacgggcagatcacgaggtcaggagatcaagaccatcctggctaacacggtgaaaccccgtctctactacgaatacaaaaaattacctgggcgtgttggcgggcacctgtagtcccagctactcaggaggctgaggcaggagaatggtgtgaacccgggaggcggagcttgcagtgagctgagatcgggccacggcactccagcctgggtgacagagtgagactccgtctcaaaaaaaaacaaaaaaagtcatgttatgtgaaggagaagcccagaagaggaaagcagaggagtcaggcatgccacttactcaggtaaagtgatattctcagtagattgttctgtttcttatttcttcctgaaatgccgggtgctggagttgagaatcttctctgagtctgaagcatcctgcctgacaggtttgctcacactcacccatgccttccttcagtccctctcatctcgcttagattccatctcttgtgacccagtgacatgaacttgggaagaggctgcactgggcgtgatcctgggaagggctcacacccagacgtgggtggagacggggtgagggccccgtggtgtcagtgctgttgggcagcagggattgttcaggggccacatctggatgctctgtcagctctctgtggaccaggattagagaagctgcccacagaaatcacctattaatgtgcacaagtacctggtaaattctgcaataaaaattcaggaaatcttttctgccttttttttttttttttggagacaagagtcttgctctgtcgtccaggctggcatacagtggtgcaatcttggctcactgcaacctctacctcccaggctcaagcagtcctcccacctcagcctcttgagtagctgggaccacaaatgtgtaccaccacgcccggcaattttttgaatttttggtagagatggggtttcaccatctccacccacctcagcctcccaaagtgttgggattacaggcgtgagccatcacgccaggccttttctgacttttagtaatagccattctgactaatgagatggtatctcattgtggttttgatttgcatttctctaatgatcagtgatactgagctttttttccatatgcttgttggctacatgtatgtctacttttgagaggtgtctgttcatgtcccttgcccacttttttcgtttgtttgtttgagatggaatttcgctgttgtcgcccaggctggagtgcaatggtgtgatctcagttcactgcaacctctgcctcccgggttcaagcaattctcctgcctcagcctcccgagtagctgggactacaggcccctgccagcacactcagctaattgttgtattttcagtagagacggagcttcaccatggtggccaggctggtctcggaacttctgatgtcaggtgatccaactgcctcagcctcccaaagtgctgggattataggcatgagccaccgcacctggccctttgcccactttttaatggggttttctcttgtaaatttgcttaagttccttgtagatgctggatattagacctttgttagatgcatagttcgcaaaaattttctcccattctgtaggttgtctgctcactccgttgatagtttcttttgctgtgcagaagctcttaaagttaattggatatcacttgtcaattgttgtttttgttatgattgcttttggtgtctttgtcatgaaatctttgcccattcctgtgtccaggatggtattgcctaagttgtcttccaaggtttttatagtttggggttttacactgaagtctttaatccatcttgagttgatttttgtatatggtataaggaaggggtccagcttcaatcttctgcatgtggctagctggttatccagcaccgtttatgaaatagggagtcttttccccattgcttgtttttgtcagctttgtcaaagatcagttggttgtagatgcacggccttatttctgggctgactattctgttccattggtctttgtgcctgtttttgtaccagtaccatgttgttttggttactgtagccttgtggtatagtttgaagttggataacttgatgcctccagctttgttctttttgctcaggattgccttggctatttaggctcttttttgattgcatatgaattttaaaatagttttttctagttctgcaaagaacgtcattaggattagctttcaatctgtaaattctttgggcagtatggtcattttaattatatcgattcttcttatccgtgagcatgggatgtttttctgtttgtgtcttctctgatttctttgagcagtggtttgtaattctcactagagaataaattttaatggacaaagcaatgggttagtgcagtagtataagcctataatttgagcttcttgggaggctgagatggtaggatctcttgagtttgagaccaccctgggcaacatagtaagacctcacataaattttaaaacatattatatttatatatttgaaaataggtatttgtgactggagttcaagtttctatgttttttttttcatgatttaccttttcttttttttttttttttttttttttgagacggagtctcactcttttgcctaggctggagtgcagtggtgtgatctcggctcagtgcaacctgcatctcctgggttcaaacagttctcctacctcagcctcccgagtagcttggattacaggtgcccgccaccacgcctagctaatttttgcatttttagcagagacggggtttcaccatgttggccaggctggtctcgaactcctcacctcaggtgatccgcccgcctcagcctcccaaagtgttgggattacaggcgtgagccaccgctcccagctggtctactttttttaaatagcttaatatacaataatgtttataaactaaactgagtactatttatacatttttattgttgcaaagatgctgaaatacacattagcaaaaataataatgactgccaggcagtatgtgcaccgttagccccagtttcttgggaggctgaggagggaggatcatttgagatcaggagttcaaggctgtactgtgctatgattactcactgtaccccaacctggacaacatagcaagacccagtctctaagaattttttttaaaaaagatgacaaatatcatctaaaaaataggtcattgagagacaactccttatttcatctgatgtgtaaattgtatatgtgtattactttataaactaagtgtgtgtaagtgtatacatgtgatgtgtttgcatgagtgcatggataagcaagcctatagttaagctacaacatcattttataagaattttttaattttaattttaattttatttttcatttttttgaaactgagtcttgctctgtcgcccaggctggagtgcagtggcgtgatctcagctcactgcagcctccgcctcctgggttcaagcggttcttctgcctcagcctcccgagtagctgggactacaggcatgcaccgccacacccagctaattattatatttttagtagagacaggtttcaccatgttggccaggatggtcttggtctcctgaccccatgatccacctgcctcggcctcccaaagtgctgggattacaggtgtgagccaacacttttggccgtgcgtgatggctcacgcctgtaatcccaacactttgggaggcctaggcgggtggatcacctgaggtcaggagttcgagaccagcctgaccaatggagaaaggccatttgtactaaaaatacaaaattagctgggtgtggtggcacatacctgtaatctcagctactcgggaggctgaggcaggagaatcccttgaacctgggaggcagaggttgtggtgaaccgagatcgcaccattgcacttgagcctgggcaacaagagcaaaactccatctaaaaaaaaaaaaattatattttgaacagttgaaattacatctgaaatacttgccatgaccttataagtgttctacactattgggccgggtgcggtggctcatgcctgtaatcccagcattttgggaggccgaggtaggtggctcgcatgaggtcaggagttcaagaccagcctgagcaacatggtgaaaccttgtctctactgaaaatacaaaaattagccaggtatggtggtgcgtgcctgtaatgctagctgctcgggaggctgaggcaggagaattacttgaacctaggaggcggaggttgcagtgagccgagattgcgccactgcactccagcctgggtgacagactgagactctgtcaataaaaaaaaatgtgttctacactatcacgttaatgagttaatggcagtaagaatagtaatgtattatgaggaggatacatgtgtatgcatatagaatgaccttttacgcagattcagatttttgtccatgaacttaactttactcagttaggtaattgtcagtttacttttaatgctgatctgttacttaactgcttgattctttaggtttgattctaatgcccagacacaaaattaacccacaattctatagaagtgttaggtattatgttcgacacaccaagtgatattcattgtctacctgagctagaatacaagtagttggcgtcttcagagacacttgtatgctagctcaggtagatattgaatgaaaaatctacactagtttaaagaatatcataactttttatggaaaagtataataaaactcaatcacagacacataactagctcaaaaataccttaatgtggatatgtcagaatgttcacgtcagcacttcagttgagtcagtccttacaaccctcttctcatttcgtgtgaacataattactctctccttaccctgttggtcaaatacatcttttattttagggacacttgacattcagggacgtggccatagaattctctcaggaggagtggaaatgcctggaccctgtgcagaaggctttatacagggatgtgatgttggagaactacaggaacctggtctccctgggtaaggataatgcccctccagaagttggggtctgcccttagtatctctgcattttcccttgtgtgcctcttgggagcccctgcattgcttgactgagattgaaaccctgttgacttggctgggcacggtggctcatgcctgtaatcccagcactttgggaggctgaggtgggtggattgcttgaggtcaggagttcgagaccaacctgaccaaaatgataaaaccccatctgtactaaaaatacaaaaattagccaggtgtcacggtgcatgcctgtaatctcagctacacgggaggctgaggcaagaagaattgcttgcacccaggaggcagaggttgcagtgagctgagatcatgccactgcactccaacctgggtaacagagcaagactctgtttcaaaaaaaaagaaaccctgttgactcagaaatgaaaagctcccgtatgctttctggtcttgaaattccccctttcttcagacattctgtatccttcatgatacacctttgggtggtacctgggcttaagtgtgcataaaaccttatgacaaacttttaaaatatccagttccctgttttctacccctgtgcttttgattctatagttcttggaagagagttcgatgtccaattattacacagttccctacgcattcagaagcagacagtctgtgggtgaatttgtgaaatgtttttcttgaattcttgattagtttttttatttatttatagtagaatgacttataatcctttgagtatatacccagtaatgcgattgctgggtcaaatggtatttctggttctagatccttgaggaatcgccgcactgtcttccacatggttgaactaatttacactcccaccaacagtgtaaaagtgttcctgtttctccacagtgtctccagcatctgttgcttgctgactttttcatgatcgccattctaactggctttaaaggattaatttttaatatcatctctgctgcctaaacagagggcttggattttggagacatcacagcacatcttgattctttcttttataaacaggaatctgtcttcctgacctgagtattatctccatgatgaagcaaaggacagagccctggactgtggagaatgaaatgaaagtagcaaaaaatccagataggtgggaaggtatcaaagatatcaacacaggtaagagctcagatggacagagtgaaagccacacttttttttttttttttgagacagtctctgttccccacactggagtgcattggccatcatagctcactgcagctttgaactcctgggcttcaacagtcctcctgctttggcctcccaaagtgatgtgattataggcatgtgccccttgcctaccagagccacactattaaatcgtgtttataagtgggagaattgtgtggagaaataagagtttaaaacctgtgagttcttaagagaaatctttctttacccccacctgtcaccatgtcctttatgtatgtatgtatgtatttattcatttatttattttgagatggagtcttgctctgtctccaggctggagtgcaatggcgtgatctcagctcactgcaacctccgcctcccgggtacaagtgagtcccctgcctcaacctcccaagtagctgggattacaggcgtgcgccaccacgcccagctaatttttgtatttttagtacagacgaggtttcaccttgttagccaggatggtctcaatctcttgacctcgtgatccgcccgccttggcctccgaaagtgctgggattatggtgtcagccaccgcgcccagcccacgctgtcgtttagatgtgtaatagttttatgtttttgccctgcagtgttactgcagcccaaacagaggcaaaagcaaaggcttttatcatgatggacaataccctgtcatgtggcttctgtcaactctttagtccttgattctgagggtcacagagagcgctgcttcaaaggagtcccttttccctgtggtctcttcctgtatgggattttatctgatgctcagttctctgtccttatacatcagagctgaggtctgcatagacctgcctccttgacctattcatgatctgcccatttcctgtactgggaagacctgatggggagatgggaaaacacaggctgctgtcttttgcatctgggtcctggaaactgcatggagctgtttcaagccctctttgcctgttcagttctgtttgaggtgggaaaaagtcagtgattttcctactctcacatgctacttggcacagaatgcttcatttctggtcaccaaaatgtgtggagatttctccccaccagcaaccagttttggggtttcctgcaattcattggtgacactatctacctgagttagagtcgcgtcccacaggctaagggttgagttcccaagcctgtccgccaccaattgccagtagcgggttgtcacctttccatctgaccaaccagccacaagtcagggttccctcgacccccttcttctgtttggttactttgctagggtggcttacagaactcagtgaaacacttcgttatgtttattggttcatgaggaaggatgtttccaaggatacagatggacagccagatgaggagattcacaaggcgaggcacatgggaagattcactgggtgtgccgcccttgaggcccaccgcacgtgttcagcatgtggaagctctcaggaacttttatggaggcttcattacttaggcatgattggtattaactcagtctccagcccctgtacccttcctggaggatggtggttggtgctgacaattctgtgcttctaaccatggcctggtctttctgggctttctatacctgcagatatagaaaccatggatatgaaggccaatagtaagggacttgagcatcacacattttggtatctcagggttttttagcacaaaactcgcaaaccatgtttttcctctgctctcacaccaccacgacaattatcaacacagaagaagacttctctgaccaaaggtgtggggggttttccccatacaccaagcagcagacagcagctgggtgtcctccaactcacttccaacactgtatctggagatagggccaggtcccacaggtttagggctcagtctccaagacttgccccccttcccaccagttgcaagtctgggtctccaaacttctgaccaactggcttccagttgaggtttccacaatcccatctttgggcccaattagtttgctagagcagctcacagaagtcacagaaacactcaggtttaccggtttattatgaaggatattgcaagggtacagatgaagagacatgtgggacaggtatgggggaaggactgtggagcttccaagccctccctgggcgtgccactctccaggaagccgccatgtgttcagacatcctgaagctcttggaacccagtcctcttgggttttcatggaagctttgtgacatcagcattccttcccccagggtatacagcaggaacctctctggggaggtcttaagacccgcaatcagaaaggtagggggaaagttagagtcctgccttagggcaggtgaaagaagaggaggagaaggttggagaggttatttttcttaaggtctgcagagaaggtctaacccaacattatacccaaagactgtagcaagggctatgggagttatgagccaggaactgtggacaaaaaccaaggtatatgtgtatcataacaccacacagaggagcctggaacgtgtcctccctggataccaagggagggattctgaatcgaaataatggatgtgcacccagtcagtaatcaatgaaagagagttaataagcacaagtgggtaccactgcatttaaatgatataagaccagagagtcaagaaagacctggatcccggaagagctcaattaaaaaaaaaaaaagaaagaaagaaagaatccaagtgggcttttcccccctaattataaaggaaaagccttcattctttcaatattgagtatgatgttacctttcggctttttatatatggactctattatgttaagtaagttcctcgtattcctagtgtgttgagtgtttttctttcttttttttttttttcttttgggggagtgtctcatgctgtcctgatcttgaccttggctcactgcagcctccacctcccaggctcaaacaatcctctcacctcaaccacatgcctggctgatttttgtattttttgtagaggtggagtttcgctgtgttagccaggctggtctggaattcctgagctcaagcgatcctcccgccttggccttccaaagtgctaggattacaggcatgagccaccgtgcctggcgagtgtttttatcataattgctaaggtttttcaaatgtttttctgcatcagctgagattattgcatggatttctttttctttattctgttattgtgggatattacatagactaatgttccaaagttgcatccttcttgcattcctgaaataaatcttacttggtcatgaggtgtgatccattttaatatgctgctgaatttatttagctaccattttgttgaggatttttgcattagattaatcaggaatattgctctgcagttttgttttgttttgttttaagatggagtctcactgtggcccaaggtggagtgcagtggcttgatctcggcccactgcagcctctgcctactgggctcaagtgcttctcctccctcagcctcccaagtagctgagactacaggcacctgccaccatgcccggataacttttatattttaatagagacagtgtttcactatgttggccaagctggtctcgaactcctgacctcaggtgatctgcctgcctcagcctcccaaagtgctgggattacaggtgtgagccaccgtgcccgacctgctctgcagttttctttttttttttgagacggagtctcgcccggtcgcccaggctggaatgcagtggtgtgacctcggctcactgcaacctccgcctcccgggttcaagcggttctcctgccccagcctcccaagtagctgagattacaggcgcgtgccactacgcctagctaatttttgtatttttagtagagacggggtttcactgtgttggtcaggctggtcttgaactcttgacctcgtgatctgcccgccttggcctcccaaagtgctgggattacaggcgtgagccactacgcccagcctgctctgctgttttctttagggcctttgcctctgctttcaaggtaacactggcctcattgaatgtgtgtagaagtggttcacctcctcaaccttacggcagattttgaggattggtgttaaatcttttttcaatatttgatagaattttacactgaggtcatctggtccattgctgttttagttggtaggtatttaataactgattcagtcttcttatttgttactggtgtgtttagattttctacttcattgttaagtcttggtaagtggtgtctatctacaaatttatccatttttttcttggttaacatattttttgttatataattgttgagtctcatttaatttccatttttatttgtgtagacttgtttgtaatgtcctcttttacctttctaattgtagttatttcggtcgtatgcttcatgtttcttttttctagtttaggtaaggctttgtcaaaagtcttacccaaagagtgaactcttactttcctgactttctctagtgcttctctgctgttttctttgttttctaacctttattttttctttctgctatcttagtgttcatttttttctttttctttttttttttgagatggagtcctgttctgtcgcccaggctggagtacagtggtgtgatctcggctcactgcaacttccgcctcccaggttcaagcaattctcctgcctcagcctcccaagtagctgggactgtgagcacatgccaccatgtccagctaattttttgaattttagtagagacggggcttcaccttgttgcccaggctggtcgcgaactcctgagctcaggcaatccacccgccttggcctcccaaagtgctgggattacaggtgtaagccaccgtgcctggtcgtgttcatttttttctttattgagatataaagttaggttgtttatacgttatttcattgtagtttagttatttagtttttaagagatagggtctcactgtgtcacttaggctggagtgcagcagcatgatcatagatcctggaatccagtgatgatctcactttagcctcctgcgtagttgggactacaagcacacgacactgtgcctcactaattaaaactaatttattttattttatttatttattttgtttagagataaggggtctcactttgttgcctaggctggtctgcaactcctggcttcaagagatcctcccacctcagcctcccaaagtgctgcgattataggtgtgagccaccacacccagccgttttttttttttcatgtatgcatacatcattacaatatcccttccagcactatttttattgcatttcatgagttttgctgtgttatatttacattttcctttatatcaagatatttcctaattttccttttattttatttttatttatttacttttatttatttattttgagatagagccttgctctgtcacccaggctggagtgcagtggcacgatctcggctcactgcaacctctgcctcccgggttcaagtgattcttcttctgcctcagcctcctgagtagctgggattacaggcgcacgccaccacacctggctaattttttttatttttttatttttagtagagatagggtttcaccatgttgatcaggctggtcttgagctcctcacctcatgatccacccaccttgacctcccaaagtgctgggattacaggcgtgagccaccgcatgtggtttttttttttttttgaaacggattctcattctgtcactcaggctagagtttaatggcacagtctcagctcactgcaacctctgcctgccgggttcaagcagttctccggcctcagcctcctgagtagctgggattacaggcacacaccaccatacccggctaatttttgtatttttgggtggagacggggtttcaccattttggccaggctggtctcgaactcctgacctcaagtgatccgcccacctcgccctcccaaagtgctgggattacagccaccacacctggcctatgcagctgctcataagtgtcttattttccctaagagactcatcctgctttttcttagaagctttcaatttctgttgtatttctctactcataatccctctcaaactcacctgtaatcctcctgagtcctgtagattccccattgctccattgcatcaccctaccttttgggttttctccactgccagtgtgatactatgctgatatttcttccagtgtctgaatcagatgaggcagattccagttcctccatcagggtctatacatgccagagtccgggcgcggtggctcacacctataatcccagcactttgggaggccacggcgggcggatcacgaggtcaggagatcgagaccatcctggctaacacagtgaaaccccgtctctactaaaaatacaaaaaaattagctgggcgtggtggcggacgcctgtagtcccagctacttgggaggctgaggcaggagaatggcgggaacctgggaggcggagcttgcagtgatccgagatcgtgccactgcactccagcctgggtggcaaagccagactccaactcaaaaaaagtgcaaaaaacatgccagaaccatgggttcaaattatactctttacttgctttcctagggaggagctgtgcagtgagaagcaaagcaggaaacaagcctattacaaatcaacttggattaacctttcagttacctctgccagaactggagatatttcaaggtgaagggaagatttatgaatgtaatcaagttcaaaagttcatcagccacagttcttcagtttcgccacttcaaagaatttactctggggtcaaaacccacatatttaataaacataggaatgattttgttgattttccattgctgtcacaagaacagaaagcacacattaggagaaaaccttacgaatgtaatgagcagggcaaagtcttcagagtgtcttcaagccttcctaatcatcaagtaatccacactgcagataaacctaacagatgtcatgaatgtggtaaaaccgtcagggacaagtcaggcctcgcagaacattggagaattcgtacaggagagaaaccttacaaatgtaaagagtgtggcaagctcttcaatcgaattgcataccttgcacgacacgagaaagtgcatactggagagagtccttacaaatgtaatgagtgtggcaaggtcttcagtcgaattacataccttgtacgacatcagaaaattcatactagagagaaacctcataaatgtaacaaatgtggcaaggtttatagtagcagttcatacctagcacaacattggagaattcatacaggagagaaactttacaaatgtaataaatgtggcaaagaatttagtgggcattcaagcctcaccacccatctgttaatccacactggagagaaaccttacaaatgtaaagaatgtgacaaagcttttaggcacaagttctccctgacagttcatcagagaaatcataatggagagaaaccttataaatgtcatgaatgtggcaaagtcttcactcaagtttcacatcttgcacgacatcagaaaattcacactggagagaaaccttacaaatgtaatgagtgtggcaaagtcttcactcagaattcacaccttgcaaatcatcagagaatccacactggagagaaaccttacaaatgccatgtgtgtggtaaggtctttaggcacagttcatggtttgtacagcatcagagaagtgttcatgagagagtccttacaaactgagtttggcaaactctatcataagttctagcagtaatcaacatccgagagtctatactagaaagaaatcatttaaatgtactatatgtggcacaggctgtatcgagacctaccaaatcactagacatcgaaacattcatctttggtgaaaccacacaaatggattgtgtgtgccaaggccaacaagtcaaaatatgttgaacctaatgatatgatgtgtataaagggtgcaaggacacgtggaaatgatctgtaatattcgggttattaaaaatgtaattggctgggcgcagtggctcacacctgtaatcctagcactttgggaggttgaggcaggtggatcacaaggtcaggagtttgagaccagcctggccaatatggtgaaacaccatatctactataaatacaaaaaaattagccaggcgtggtggcacatgcctgcaatcccagctactcgggaggctgaggcaggagaattgcttgaatccaggaggcagaggttgttgcagtgagctgagatcgcgccactgcactccaacctgggtgacagagcgagactccgtctcaaaaaaaaaaaaaaattatttgggtttgaaaggccaggggcagtggttcatgcctataatctcagcacaatagaaagccaagacaggagggtcacttgatgcctggagatcaagataagtatgggcaacgtagcaaggcccatccctacaaaataaaaaaaataagccaggcccttggcatgtgtctgtagttccagctactcaagaggccgaggcaagaggattgctcaagcccaggagtttgagagtttgagcagtgagctctgatcttgccatttgtactccagcttgggtgacagagcgagaccctgtctcaaaagaaaaaaaaggctagtttttatgacttcaacctgaactttgaaatttcttcatgtgccttccctacaggcctttcactgtggtctgggaaagaatcagtaagatgacagggctgacttcattagatgaggagcgtttctatccagtttcctggaggaataaggacactgccttttcagattaaagattgtctgatttagagaccatggaggtggacagagaataacaaaaccgtgatggcagtcatcatgcttattgcagttagcacacacttttcctgacaggcacagtgctgctgtgctctacaaatgaccatgaaatagagcacgccatgactttaggacacagggatttttatgggaagagagttcatcagggactgattacgtaggagagacgatgcaggggaaatggtggccaccgtctccattgaatagcaatagctgctgtttagcaaagactgattaaaaagtactctgatttttcaaatggaagagagaacagttaaatcagagtagagagtttaatcaaaactaccagtggaacatgttcttgagtaggattcacatttaactgctggcataatttgcaactgttggattttctcatgtttggaacaataaagttgaaattttccaaagtgtgaatgatttaccttctttctaccaatattgttttatctcgtctcaggaggatactttatagcagacaataataaggcaccattaggatttttaaattaatttatttttaaaattaaagttctagtgtacatgtccacaacatgcaggtttgttacataggtatacatgtgccatattcgtttgctgcacccatcaacttgtcatttacgttagatatttctcctaatgttatccctctgccagccccccaccccccgacaggccccggtgtgtgatgttacccgccttgtgtccaggtgttctcattgatcaattcccacctatgagtgagaacatggggtgtttggtcttctgtcactgtgatagtttgctgagaatgatggtttccagcttcatcaatgtccctgcaaaggacatgaactcatcctttttatggctgcatagtattccttttttttttttttttttgagatgaagttttgctctgtcactcaggctgaagtgcaatggcacgatcttggctcactgcatcctctgcctcccgggttcaagtgattctcctgtctacacctcccaagtagctggattacaggcatgcaccaccatacccggctaatttttttgtatttttagtagagatggggtttcaccatgttggccaggccggtctcgaagtcctgacctcgggtgatccagccacctcgggttcccgaagtgctaagattacaggcatgagccacggcgcctggccaggatttttaaggttgaagcatccacaacaattttgtgtgtgaaatgaaatgacatgcacttttgggtatatacacttgggtaagtatgattttgggtaataatacttagtacttaagttattctctctactctttgtttttgttttttgtttgttttgttttgttttgagatggagtttcgctcttgtttcccaggctggagtgcaatggtgtgatctcggctcaccgcaacctccgccttccaggttcaagtgattctcctgcctcagcctcccgagtagctgggattacatgcatgtgccaccatgcccagctaattttgtttttttagtagagacagggtttctccatattggtgaggctggtctcgaactcctgacctcaggtgatctgcccacctcggcctcccaaagtgctgggattataggcatgagccaccacacttggcctacctctctactctgccctaagatgcttttgtgggtaaagtgaaaatcacataacagtgcagcttcatcatcatatgccctcaatgttcatcactgttgataaacatgcactgtattatgtttctgtgtgcctttttcttgtgtgccaagtaagacccatggcaggcaccttcattttcaggaagcgaaaatacagatacagtaatatggaaaataggacaaagtgtggacttcaggatgaaaatattgtaacaatcttgctgttgacctcgtagcgctcagtgacataatttgaaaaaatattaatgttcagaaatgttctcttgaggatgaacacacagattgggaatttcgttttgctttggtagattaactagaaacttcacattttcacccttataacctttttggtaatttgaacttttgatcattcttctggaactgctttgacatccacctgaagtttggtttgggtattgagaatgatgatgccattcactaatgtgatctcaaaatgtttactccataatgaggctttctggggagagcagggtagacttccccggttggtccaaatatgactagggaatcggcataggtgactggcttggggtatgatgattgttaagggatagggcttgggcaggggtgcccacttgtggtttgaactttcagctggtgccaaaggagtgggcactgaggatttttcagttgaccagatgggcagaataggaagagggagtgcagaggtgtaaaaggcgttggtgttcagacatcacaaaatgcagtcaactctaggacaactctagcttcctctggaagctcctgccatcttggttaggaaagactctgattttcttcatgataatatcttacgttccttttatagttacagatacaggtctcattgcacaatatgattgttgaaaacacttgtgaaatttttttagtaaaattgcctaagatactttttatagtagacaatgaaaattagtgtgtgggtttataataaatataatgtattatataatatgattaaaatatatttgttataaatatgatattactagaagagcatttttccaaaagctatggaaatgtcattttcccgttacagcatcaagcaatatattccatggttcattttcaactctaataaaattatattttgtgtttatatatgcacgtatagacacatatataatattttttttttacttttttctttttctgtacattgcatccagatgctatgcttgtttgtttttttttttgagacagagtcttgctctgtcacccaggctggagtgcagcggtgtgatcttggctcattgcagcctccgcctcccaggctcaagtgattctcctgcctcggcctcccgaatagctgggattacagacatgcaccatcaccacacctggctaatttttgtatttgtaatagagatggggtttcaccatgttggccaggcatggtcttgaactcctgacttcaggtgatccacccgcttcggcctcccaaagtgttgggattacaggcatgagccaccatgcccggccagatgctatgcttaatacattttttccgaatgtcactctagtgaaaattttaggggacacaaaaatgagactgttgtttggagacaatattttttgacaagagtatgcacaagacaatggcaggtataaacgttttattgtaaatatgaaaaaggaaaaaatgctttcactatattagaggacttgaagtaacgtgaagtgattccaaccctttatctttattttatttatttattttattatttatttttttgagatggagtttcactcttgttgcctaagctggagtgcaatggagtgatctcagctcactgcaaccttcacctcccgggagcatgctgctctatcttttttttcagatgtttgagctattccaggttttttgggatttctgttggtttgttttgttttttgcttttctacataattgtttggataatcttgtcagtatctacgaagtgccttgatagtaaatatattaaccctgtgtatcaatttggggtaatttcacatttttttctatgttgagtttatcaataaattgatattgtatatgtctctatctgggtgtctttgatttctttcatcagcattttgtagttttaaaatcctgagaatgttaaattaacatattttttgactttttttttttttttttgagacagagtcttgttctgttgcctggtctggagtgcagtggcacaatctcagctcactgcaacctccgcctcccaggttcaagcgattctcctgcctcagcttcctgagtagctgggattacacgcgtatgccaccatgcccagctaatttttgtatttttagtagagatggggttttaccgtgttggccaggctggtctcgaactcctgacctcaaatgatccacctgccttgacctcccaaagtgctgggattacaggtgtgagccacctcgcccggttaatgcttttttaaaaccaacaattggtgacctaaattctcactggccttagccctccatgcccctggtgctgtcactagaaaactctctggagctgagcacagggttacctctgtccctcccgaaagaacagggaatagaaaaggagaggatttctattctgctttgtgggccgtcagcatgaaattgcacattctgcccaggcagggctttgcagttcatgtattaacttgcgtcgctttcacagacaatcccagggcttaattaaattgctaaatttagttttttatgtatttatttgagagactgagtctctgtcgcccaagctggagtgcagtggccgtcataactcagtgtaaactcgaactcctgggctcaagcgatcctcccgcctcagtcttcggggtagccgggactacaggtgcccgaccgcacggtcggcttaagattaactttaatagcaggaattttcctggatctaatcattagccgactttgctcagtcccggcaagagtacagttccgagacagctgagttgctccagtctccttgacaggtctccccggcaaaacccggaaaacagaggcactggaagcgaggcggagggaagcgcaagccccactccgccccgcccccgcccccgcccccgcccccgcccccgcccccgcccccgcccccgcccccgcccccgcccccgcccccgcccccgcccccgccccgctcggacccctccgctgcgcgcgcagtttcccacaaacccggaagcggatcgcgtggagtgaaggtcacgccgcggcgcgtgagtttccctttgtgtaaattaatctgcgcttcccaactcccccgcgcttctgtacccgggatctgaggggccacacagaccttgaaatcctcgcaccgctccctctaccccgaccaaattcaggcgtctccgtgagagtcaggcggtcgcttccctgtgtgtttaaatcgctcggcggcgggtcctgtcccccgtccttctgccacagggccatgtagtcacctcctgtcgcggagttttcctgtttcaagtccttcagtgatgcttacatccgccccgcacagcgtaaagtcctcccccgctaggcggattccggtctatgcggtcccccaagcctcgcctttgttggccctggagcacagcgctccaatctcaatccaggagaagccgcgtcttctgcccagtgctgggattctgcagacgccacccatctcttgatccagaccctacctttaccctccttgatacggggccccgctactccccaggcctcctcttcccagacaccgcttctcctaaccctgcgtgtggggaggtgacttactctgtctcttgacatccagtgttcttgcgggccaaataacaccccactgaaaaggtgttctgcttgtggacatcggatcccaattccttccatgtgaatgtgtgcagaaagagagacggagagcgagggagaagaaagagaaaaattttgaaggagaaaagaagattgagggagagccgtaagcagatggcaaagtagagagtggatggaggatttgcagagacagcgaatgaagccgagaaagtagcagggggaaaaaagcaactggagaaatgcagagaaaagttccatctccggagagatgaaggacagcaagatagtgagaggggcagcaaagtgggaagttcctcagtttgagagtgggggagagggggagggatttggagccagggcagacagagcagcgtggtgctgggacagcaagaggagtcagctggtgacaacgagagcagagggagaaccacagcaggtggaggcctgggatctcagggtgccagagagtggggacaagggggtgtaacagaaaagaagggatttaacagagagagcagagggggagtagagtcaggggaagaggcaagaccgggcacagtggctcacgcctgtaatcccagcactttgggaggccaaggtgggtggatcacgtgaggtcaggagtttgagaccagcgtgggcaacatggtgaaaccccatctctactaaaaatgcaaaaattagccgggcgtcagcgcgcgcgtgtaatcccagctactcaggaggctgaggcaggagaattgcttgaacccgggaggcggaggttgcagtgagctgagattgcgccattgcactccaggctgggcgacaagagcaaaactccgtctcagggaaaaaaaaaaaaaagagacaaataggtggagaatgggatgatcaaagattgagcagaaagtttggaagaggggtgaaacaagttgccagaatggagcagaacaggtggaagagaaggaatagaaggaagaaggggagaaacatcaggagaagagaggggctcaaaatgagcagaatcttaggggaaaaataaagggggaaaaaagctagagaaagaaggtgagaatgagagatacgtacagaatgagggagggaaacacagtacccagaaaagagggaaccctgggtgcagatgaacggtgagttgattggatattatgattaagttgtgacattgatttatctatttataatttgataatatgaaatatactttaaaaatacagatgaaaatggatatgcaaaactcctgtctgtaaggctggtgcattttataattcttggcatcagactttagcttccactcacattccctattcaggcacaggtcagtgacttgagtcattcaggtgtgggtcacccactttccttttcctgggatggggtagggtgtgggcgagtgtaaaagatagcaggaaaaccaaagtgtttttcctactcttgcagtcaacacaatagtgaacactcaacacagaatgcttcatatctgatgaacaaaatgtgtggggatttcttcccaccaacaagcaattcgtcagacaccgcctgggtgatccgtaatttcagtcaagttgacactgtctacttgaagttagcatcagatcccacaggttgggggctcagttccacaaggctgccgctacttcacgtgctggttgtaagttcctggttgggacctgaacttcaaccaaacatctaaaaattgaagattcccttgaccctttgctcagattttattaatttgttagcctcattcacagaactcaaggaagcattttgcttagttttacccatttgctatgaagaatattgcaaaagatacagatgactagcccgatggaagaaccctcctagcaaattaatcaaaagaaggggctttgggataccctgattttttttttcttttgttttgttttgagacagagtttcactcttgttgcccaggctggagtgcaatggcatgatctcagctcactgcaacatccatctcccagtttcaagcatttctcctgcctcagcctcccaagtagctgggattataggtgtgtgccaccacgcccagctaatttttgtatttttagtagagacgaggtttcacaatgttggccagggtggaataaatggagttcagtactgtttgaagttccaggcatccaatgggggtcttgggacatcttccccatggatacggggattccagtgtgttctgtctctggtgctgagcaccaaggctctgtgtcctccatttctgagggattacatgagcctgggatccatagagaggagaggaggggctgtgctctgcatggggtttggtcagggctgggtctggccctgaaggggagcttagaccaggccagctccccactgctgcagcgtgcgtgtgggcatctctaggaggggagcaggttctgaagacgagtaaaaaactcacttgttgttcttcctgtaggagtttcttgtctctgcatcaactctggtgcagtgggcagcagaggacatctttccgcagggtgaggtctaacctgtgtgtgtgattgtggcacaggaaaagggtgtgttgattctaagccctaaacagcatatttttgacatttaggattgacttctaaagagtcatgctgtgtgatgaaaaagcccagaagagaaggaagaggaaagcaaaggagtcagggatggctcttcctcaggtgagatgatattctcggtggattgttctgtctcctttctttcagaaacgctgggccttcgagttgggagtcttctctgagtctgaagtgtcctgcctgacaggtttgctcacgcttacctatgccttccctcagtgccgagaccagcttggtcgtggggaccctaacctagtggcactagaggaattaaagacacagacacaagaatagagtgtaaagtgggatcaggggccaacagccttcagagctgagagctgcgaacagggtttgacccacatatttattgacagcaagccattgataagcattgtttctatagattatagattaactaaaagcattccttatgggaaacaaaacattcttagcaaggagtagagaaacagtctttggctaattatctgcagcaaaaacgtgttaaggcacaggccactcatgctattgtttgtggtttgagcagttttccactccgggcaggccaggtgttccttgtcctgctccagtaagccaacagcttctagcagtgtgtgtcatagccatcacaagcacgtttcattgctgcaaaaatcctgcttatggccaatttctttaaagcctgttgccagcatgttcccctttctgtttttgcaaagtgacaaaggcaaaggctgctttgtcacggtgggctacttctcacaggattcgggattcgggatttggatctgcatgctacacaaagacaaacaacacagattaaaagcacaatcatcattgaaatcagggagcctccaattgtcttgatccattttaacgggttaatagctgctaatctgtctgcagctccttcaagctctttagttcctggcattagcatcagatgtgcctgagaggcttggaatacttgttccttcagttttgtaatatctaaagataaatttccagtatgaccctttaaatgtctcttaactctttcctactcatgctctgtttcattatacagatgaggagtaatgcaaaaatcagaagtattccaatcacattgtatctgcattctatattctagactaactacttgatctcctagccgcattacagtttatcggagatcattgatttgattagctagttttcagtctgtgttagtttgggaattccactgcaaagtagaatttttctgccaattatttacgtagtctgctctttgtactgtggaatgcaaagtaactccagctaccgtggcagtagctgtgacagcaatcaatcccataatgattaaaattaaagtggcaatgaaacaccgagagtacctcaaactcttttgaagaatttcagtaatgtatgcacagaaggagaggcttcccaaggacaggaaagctttacaggtatccatactccttctcaggctcttaccactaaaatagaatgatgagtattatacagggaagaattcaagaaaacaatgtacattcttgacaagtcacatgatgattagggagatcaagttttaaatcacttactccaaacagaaaaggaggccttattgtcagtctcgacatggctgcaactggggggtcctcgggttcctcccaaaatctcttcctcagcatctggctcatgataaggtttcaggtgtcttaatggtatccaaatcggctgctggttttggcctggagatacacaagcataacttctaccccaagttattattttacctatttcccaactttttgttatgggatctctccaccaaaccagttctgcttctgtctttgccgctgatttctgtaaatgctgttcagctgctgatagcatttggcctttaggcaggctcaaaaaatttaaagtcaataatgctagattcagttgcataattgcagttccataatcactgttcccccctttgtgtttttgtaattgctgttttagggagagattcattctttccacaatggcttgtccttgtgaattatatgggatgccagtaatgtgtttaatactctatatagagaaaaatgtagctagagcttggctagtacggccttgggtgttatctgttttaataaaagctggaatgcccatcactgcgaagcattgcagaaaatgccatttaacacaggcagaagagtccctcgtttgacaggtagcctaaacaaagtgagaaaaggtatctacacatacatgcacataagccagtttaccaaaagaaggaacataaatgacatccatttgccaaacagaattaggttccaatcctcgaggattaactcctcctgtaaaagatgaggaatgcaccaattggcaagttgcgcattgctggataatagatttagcttctttccaggtaatgctgtatctatgttttagaccagaggcattaacatgggttaaattgtgaaagtgtctggcattagatattgcagtagcaactaggcgatcagccatttgattccctgcagttaaaggtcctggaaagggtgtatgagctctaatatgagtaatgaaaaagggtgcattctattcctaactgtggtttgtaactgggtaaataaagtcattagctgttcatctgttgaaatcataactgagcatttttaattgtgtggaatggactacatatgaagaattagaaattacattgacaggcatcttaaaagcagtcagtaccttaattacagctacaagctccgatttttgagctgaagtatagggcgtgtggaagactttagtttttgatccagagtaagaagctttactgttactagacccatctgtaaaaacattttcagcacttttaattggtttaaatttagtcattctagggagcatctagttagttttaaaaattgaaataattttgtttttggaaagtgattattaagcactcccacgaaatcagctaagtggttttgctaagtaagatgatttataaaggattgttgtatttgtgcctttgtaagagggacaataattttttcagggtcatatccatgcagtttaacaattcaaattctcccattccctatcagagtagcaatttgatccaaataatgaattagaatccatgaattcatatgtggaagaaaaagccattctaccaagtctgcttttggacagtaacaccagtaggtgaatgctaagttggaaaaatcaataaatctaaagccttttctggatctattctatttatttgaggttttatgtacttgtttttcaatgagttgtaactctgcctcagcctcctttgttaattgctgagggctagtgagactaggatctcctttaaggatagaaaatagattactcatgtcataggtaggaatgcctagagcaggttgtatccaattaatgtcccttagtaatttttgaaagtcattcagtgttttcaattgatccttatggttactttctgtggcactactgtagtgtcatttactaaggtccctaagtaggagtaaggagtagtggtctgaatttttgtcaggagctataattaaactggcatgagaaatcgaattttttaagtgatcataatattggagtaatatttcctgagtgggggcagcacaaagaatatcgtccatataatgaataatataacactgaaaattttttatgagtaggttcaattgcttgttctacataagtctgacaaattgttggacagtttaacatgccttgtggcaacactttccaatgaaaacgcttagcaggctgcaggttgtttaccgcaggaattataaatgcaaaccgttcacagccttgctcagctaaggggatagtaaagaaacagtcttttaaatctatgactattaaaggccaattttttagaatcagcaggaaaaggcagtcctggctgcaatgtccccataggttgtataactgaattaatggctctaagatctgtcaacatgctccatttatgtgatttttttcttaataacaaagactggagaattccagggggaaaatgttggagctgtgtgtcctttttctaattgttcagtaactaagtcctctaaagcctccagtttctctttacttagcggccattgttttatccaagttggtttatttgttaaccattttaaaggtataggttctggaggcttaacaatggctgccatgaaaaattatatcctaaaccctggtgggaattttgtccttctgcttgaagtggtttctttaacccttttaaatttttttctaatcccatgccaggcacataccccatctcttgcatcgtatgctgactttgagggctatataattgttctggaatgaacgcttgtgctccccattgctgtaataaatctcttccccataaatttataggtacagcagttacaattggttggctgggtgtggtggctcaagcctgtaatcccagcactttgggaggccaaggtgggttgatcacgaggtcaggagtttgagaccatcctggccaacatggtgaaaccccgtctctactaaaaatacaaaaaaattagccgggcatggtggtgggcacctgtggtcccagctacttgggaggctgaggcaggagaatggcgtgaacctgggaggcagagcttgcagtgagctgagatcacgccactgcactccagcctaggggatggagccagactctgtctcaaaaaaacaaaaaacaaaaaacagaagttacaattggttgaatagtcccagattgttcattgggtccttcacaatgcaatatataactgctttgatatactttaggggctatgccaactccaactgtgttaaatcgagtgggttgaattggccacacggacagccagtgctgtagagaaatgattgaaatgtcctctcctgtatctaccaatcctttaaatttttttccttaatagttatttcacaggtaggatgtttattagtaatttgattcacccagtaagctgctttgccttgtttattcgagcttccaaatcctcctgttcatttagttcatagcacaggagcttccaaatcctcttgttcgtagcacaggagctgtgctatgggctctcctggctctgctttccagggaacagaagtagatataacaatttaaatttccccattgtaatctgaatcaatgactcctgcatgtacttgcactccttttaaatttaaactagacctacctagaagtaatcctactgtccccactggcaaggggtgccacagactcctgttggcactttttgcgggggttcctcaggcagaaagctcacaggttttgtgcagcataaatctactaccagctatggcaggggacaggtattgtatgggggtgagggagtggcctgagctggaaatgccccggtttggaatgaggcctgggacgggcccctcatggcgtttcctgaaatcgggttcccatcttcatcaaacttagagtgacactgattagcccagtgttttcgttttttacattttggacatatttcagggtcagcagatttcttttttcccccaactggcagcctgacttgctggttttttctacattctttttcaatatgatcatgcttcccccagttaaaacaagctccaggaagtggagtatttcctttacccactttcagtcctgccattgcctgggctagcagagtagtcttatgcagattacctccaataccatcacaagctttaatatagtcaaccaaatgtgcttttcccctaataggtcacagagtggcttggcactcaggattggcattgtcaaaaactaataaccacaacactacgtcctgagcagctgaatctgcaatcacctttttaagagactcctgtaatctagctataaaatctgcatacagttctttcagtccctgcttgacagcacttgaagggtattgttccctgcctgaagtgatttttttcccaagctctaatgcacactcctctaagctgctctatggcatcatcccacataaccacttgtgcatctaaaccaccccagccaccgactcccaaaagttggtctgcagttatattaatttgaggttgggcctgggcgttgtgagcagcctggatggaagcttcatctgcccaccaagttttaaattgtaagaactgagcaggagttagacaagctcaagtaagtgcattgtagtcagtaggaatcatttgactggagacagcaacattctttaacagtcccattacaaaaggagaacctggtccatattgattaatagcttgtttaaattctttaagtattttaaaaggaaaaggctcaaatgtagccatcatattcccctgttgatcaggtgggtgtattctaacagggaactgccaagcatccatatcacactctcatctagcttgctggattcctgcctgaatagaaccgagagcagttgcttgaggcgctgctcgaacagtcactagggcaactactttttgtccagtgtcctctggaaaagaaagacctggagggtgaggccactctttttcttcaaaatgatgagggggtgtagacgggtagggacaaacctctccctcctttgctgctttagctggcaaggaaaccttctctgtcacttcttctgtacttcattacactccccttcttcctctgattcctcttccttatcatctgtgtggaaaggctccaaggtggaatgaaccagagcccacactgaccagacagttataggaatatcctcagcgccatccttatatgacttcttcagtgtgctgcctaccttttcccagacctctacattcatagtttctcagtccggataccaggggcaatatttctctaccacactaaaaacctgcatgagtcagctagtgctaacctttacttttccttttctgaggagctgctgaaggagactcaaataagcctcgtgtctgctcgacccttgtcccattgttaccctgatgcttctgagctccccttcttactcaccgcagggattgcttaagagtacttgggtgttctccagtgtagttccacgttctccagccgtcactctggtgacccttcgacaagggtttgagccccatgttaggcgccacttgctcagaccagctcggtcgtggggaccctaacctagtggcgctagaggaattaaatacacagacacaagaatagactgtaaagtgtgatcagggggccaacagccttcagagctgagagctgtgaacagagtttgacccacattttattgacagcaagccagtgataagcattgtttctatagattatagattaactaaaagcattccttacaggaaacaaaacattcttagcaaggattagagaaacaggctctggctgattatctgcagcaaaaacgtgttgttaaggcacaggctactcatcctattgtttgtggtttgagcagttttctactttgggcaggccaggtgttccttgcccttctccagtaaaccaacaacttttagcagtgtgcgtcatagccatcatgagcacatttcattgctgcagaaatcctatttatggccagcttctttaaagcctgtttatgacaggcttagggcctgttgccagcaccgcagtccttctaacctcacttagattccatctcccgttacccagtgacatgaactggggatgaggcttcactgggcatggttctgggaagggctcactccctagcatggatggagatggggtgcgggccccatggtgttagagctgttgggcagtagggattgttcaggggccacatctgacttcaccgtcacctctctgtagaccagaagctgcacgtggaagtcatgtattatgcacaagcacctagtaaattctaggaaaggagtgaaggaaggaaaacgttttctgcttgatttttttcttctttttttttttttttttgagaccgagtcttgctctgtcatccaggccagagtacagtagcgcaatctcggctcactacaacttctgtctccctggttcaagcaattcttgtgcctcagtgtcccgagtagctgggatgtcaggtgcccaccaccacgcccagctaatttttgtatttttattagagatggggtttcaacatgttgtctaggctggtcctgaactcctgagctcaggtgatccacccacctcagcttcccaaagtgctgggattataggcgtgagccactgtgcccagccttcctgcctgatttttactacagttgaagctaaacgcctttcccagttttttatgtctaccttggttcagggaggacgttctctcatcattctcagcatgtgcctctcacagagaccgattttcctttggggagtctcctgcaccagctgtgttaagcaaaaaatgtgataattttgctcagagattggagcagatttttttttttgtcagagaggaggaaatcatattcttgtccacgaattattattatcattttttcaacatcaaattatgtataaatttgtcttataggaaaactccaaatgtacaggttaggccatcaaatacaaaacattccctgtcctaaatgtctatgtgacatgtaaataattgttatgggagggagccttccaccctctctcagtctcactgggacccactcctgtcacctctgtcaggagtgagagcaagtcctgtagaattatatgtatacagcattgtggtgttttaagtaaaattctcagtgattgttttatgatactttattctgtaagttgtgaaaatttactcctttacaacttcatgtgaacgttctctgaattaacaatcagtcacctctctgtttttagtgtctggcttggttcagggaagatgcgctctggtcagcccagctggagactctggaggtccctcgccttgtctgggatgtgtcctctctgggctttgcttgttacctcctcactgaagggggtgaccaggttctgctgaggagtgtccctttctgcacctgctcttcagcctgtgtggggcaataggaagctggggtctgcactgtcacctggtgtctgcctgcattactgctggctctggtttatactggtgcctttgttctcagtggcttcctgacctggggccctgttacttcaatgcttatgttcagacaagacagaaacttgtcccttaggcagttccctgaaaagtcagaaggttggatagacattcccattgttttcctctctcaggagatatctggagtttgtggtatcctctggatgatggcatgtcatgcctgggcaggggttctggtgggcgtgtgtcacattttcacactcagctcccagtaggttgacttggtactggtgcatctctgggtgcagcctcctgagtggcttctggatttctcacaaaagtcagttggcccacgtattcttgtttaatttgtgtccacatggattcaaaatggtccggggcttcctattcctctgtcttgctgacattactcttttagtagagttgcagatttctaacacaggtctggaatgtcttctagttaggggccatttcctaagggagatgtcagatgtttctttcctgtatgtgtcattttataaataatgctgctaaagaaggaaatttttttcaatatatttttttcttttttttaaatttattttcttcttttaattcatttttctttctttctttttgagacagagtcttgctctgtcacccaggctggggtgccgtggcaggatctcagctcactgcaacttctgtcttctgggttcaagcaattctcatgcctcagcctcacaagtagctgagattacaggcacccaccaccatgcccagctaattttttgtatttttagtagagatggggtttcaccatgttggccaggctggtctcgaactcctgacctcaagtgatccgcctgcgttggcctcccaaaatgctgggattacaggcatgatcccagcactgcaccaggctaatatattcttattagttaatatgttaaaatgacattctttgtcttggttaaaataattttgttaattatatacatttttaaatccagctttttcctgcctccaaccccaactaatttttttttttttaacctctctttctggcccctgcccaggcatcctgtgcagtggtgattggctgcagcacagaccagcccccttttccctgccttaaagtcaaggaaatgtctgccatgtttactgctgattatcatgtttcatgagacgttcttgcttaatgatatggttgtttttgttttcaaattttatttttgtccttgtttttaattatctagtaatttcttaagatgtatactgctagccggtcatggtggctcatgcctgtaatcccagcactttgggaggccgaggcgggtggatcacgaggtcaggagatcgagaccatcctggctaacacagtgaaaccctgtctctactaaaaatacaaaaaaaaaaattagccgggcatggtggcgggcacctgtagtcccagctacttgggaggctgaggcaggagaatggcgtgaacccgggaggcagagcttacagtgagccaagatcacgccactggactccagcctgggtgacagagcgagattccgcctcaaaaaaaaaaaaaaaaaaaaaagatgtatactgctgagatattttctgtgacttattttgttgaattattatatcatattaataaattttctgtcatgtattaatgttttattaatggaatatattgataaaccccattgggcttttgtaaataccaaatagataaattttatggacataattattatatttatgtaagtcagggttgatcacatgtgtgtagaatcccagcttcttgggaagctgaggcaggagcatcccttgaatgcaggagtttgagaccaccctaggcaacatactgaaaccccatctcaattttttaaaatattatatataatcatattttttatatcaataaagatgggatctttctatgttgcccaggctgttctcaaacccctgtcctcaagcagacctcccaccttggcctcccaaagtgctgggattacaggtggagccaccatgcccagcctacatttatatttttgaatctgggtatttaatagagattggagttcaactttctgtgttttttcatggtctatcattttttaatggcttaatatacagcaatgtttataaactcaattgagtacaatttatacatttttgttgtaaacatgctgaaatgtacatagcaaaaataacaatgacaggtgggtgcagtggtacaaacctttagttccagatacttgggaggctgaggagggagaaacatttgagccccaggagttcaaggccatagtacactgtgaataagccacctccatgcaacctggacaacatagtgagaccctgtctctaaaaattaaaaaaaaaagtgatgacaaatgtcatctaaaaaataggttattgacagacaactcctatttcagttgatgtgtataagtgtatatgtgtgctagtgtatatgggtctaagtgtacatatatataagtgtggaccgtgatgcgtgttcatgactgcacagatgagcaagcctatggttttattaaagacatgtcatcatttttatgtatttttttaacagttgaaattacatctgaaatattttccatgacctcggaaattgtcgtacaccatcatgttaatgagttgatggctgtgaatagtaacatgggatacatgtgtgtactcatatataattttttttttttttttgacagagtctctgtttgtcaccaggctggagtgcagtggcgcgatattggctcactgcaatctcggctcactgcaatctctgcctcccaggttcaagtgattctcctgcctcagcctcctgagtagctgggattaaaggcacgtgccaccatgcccagctactttttgtattttttagtagagactgggcttcaccacgttggtcaggctggtcttgatcccctgaccttgtgatccacccgccttgacctcccaaagtgctgggattacaggcatgagccaccatgcccagccataatgaccttttatgaaggtccatgattttatccctaaacttgttttaacttttttcttaggtaattgtcaatttacttttgatgctgatctgttcattgtttgattcttttggtttggttctaatgcccggacgcctgggatctggtgcttactttgctgtttttagtccttacacctggggcgagtttcttagggtatctgtgacacagttgtcttctcagtaagacagggacaggtctttctttcatgggcttttgttgttataggagttagtacatgtaaagcatttagaatagtgcctgtcacatggaaagtgttcaaaagcttcagtcattgctattgttatcatcccagttttataattctttttttttttgagacagagtctcactctgtagcccaggctgtagtgcagtggtgtgatgttggctcatcgcagcttctgcctcctgggtttaagcaattctcttgcctcagcctcctgagtaactgggattacaggcacccaccagtacccccagctgatttttgtatttttagtagaggtggggtttcaccatgttggccaggatggtcttgaactcctgacctcaagtgatctgccctcctcggcctcccaaaatggtgggattacaggcgtgagccaccgcgcccagcctataattctttctctttttttttttttttttgtgagatgaagtctcactcttttcccccaggatggactacagtggtgcaatctcagctcactgcaacctctgccttcctggttcaagtgattcttctgcctcagcctcctgagtagctgggattaacaggtgcataccaccacgcccagctaatttttgtattttaattagagacggggtttcaccatgttggccagactggtctctaactcctgacctcaggtcatctgcccacctcagcctcccaaagtcctgggattacaggcgtgagccaccatgcctggcctataattcttttttttttttgaagccactgtggacattgtcatctccaaagacaccacttgtcttgtagtggtggtgatattggtaggtattcagatcaggtagatactgaatatgacttggagtgtcaaaaataatagctaatgcttctatagagataaccatgggttaattttttatttgcatttcttatatgtccacaaaatgagaaatctattttgatttttaaaatataacttcttttggaaaagtataataaaacacaattcacaggccagggtggtggctcacacctgtaatcccagcacttagggaggctgagatgtgtggacaagagttcaagaccagcctggccaacgtggtgaaattccatctctactgaaaatacaaaaattagccaggtgtgatggtgtgcacctgtagtcccagctacttgggaggctgaggcacaagaattgattgaacccaggaggcggaggttgcagtgagccgagattgcaccactgcactccagcctgggcaacagagtaagactctgtctcaaaaaaaagaaaaaaaacacatttacagacacataactacatcacagataccttaatggggattcgtcagaacattctcttcaatccagttaatctttacaactcccttctcattttgagtgaagattaataccctttacatatcctgttggtgaaatgtggttttcattttagggacacttaacattcagggacgtggccatagaattctctcaggcggagtggaaatgcctggaccctgcacagagggctttatacaaggatgtgatgttggagaactacaggaacctggtctccctgggtgaggatcatgcccctgcagaagccgggatctgcccttggttatttcagcattttcccttgtgtgcctcctgggagcccctgcattgtttgactgacattaagcaggagaatcacttgaacctgggaggcagaggttttggtgagccgagatcacgtcattgccagcctgccaacagagtgaaactccgtcccaaaaaaaaaaaaaaaaaaaaaaaaaccaaaaaaacccttattgactcaggctgggatccgtggctcacacctgtaatcccagcactttgggaggccaaggcaggaggatcacttgaggtcaggagtttgagaccagcctggccaacatggtgaaaccccatctctactaaaaatacaaaaattagccgggcatggtggtgggagcctgtaatcccagctacttggaaggctgagtcaggagaatctcttgaacccgggaggtgaaggttgcagtgagccgagaatgcaccattgcactccagcctgggtaacaagagtgaaactccgtctcattaaaaaaacaaacaaacaaacaaaaaactaaaaaccttgttgactcagaaatgaaaagctccatagtgttttctggagttgaaatgtcctttttcttcagatgttctgtccccttcattatacatcattgggtggtaccagggcggaagtatgcataaaaccttttttgtttgtttttgagattgagtcttgctctgttgccctggctggagggcacgtgatcttggcttactgcagcctctgcctcccaggcttaagcaattcgccttagcctccctagtaactgggattacaggcacgtgccaccacacctggctaatttttctatatttcatttttacaatgttggccaggctggtctcaaagtcctgggctcaagcaatccacttgcctcagcctcccgaagtgctgggattacaggcatgagcccccgcacccagctgcataaaaccttatggcaaacttttcagatacccacttccctgttttctactcctgtgctttgttttatgttttgttttttttttttgagacagagtgtttcactcttggaggctggagtgcaatggcgcgatcttggctcactgcaacctccgcctcctggggtcaaatgattctcctgccttaactgctcgagtagctgggattagaggcatgtgccaccatgcttggctaattttttttttgtatttttagtagagaccgagtttctctgtgttggtcaggctgatctcgaactcccgacctcaggtgatccacccgtctcggcctcccaaagtgctgggattacaggtgtgagccaccacgcccagcctctactcctgtgctttatactcagtagttcttggaaaggggcttgatgtctgcatgttataatattccctaagcattcagaaggaggcagtctatggatgaatttgtgaaatattattcttgattcatttgtgatatcctgtctccttcctacacatagggcttggattttggagatgctacagcacattttgatttttttttttacaaacaggaatctctcttcctgacctgaatattaactccatgttggagcaaaggagggagccctggtctggtgagagtgaagtgaaaatagcaaaaaattcagatgggagggagtgcatcaaaggtgtgaacacaggtaagagctcagatgggcatggtggaagccatgctgttgtttgggctttttttttgttttgttttgtctagttttggttttttatgtttgtatttttgtttgttttgtttttgagatggagtttcactgtcatgaaacagagcctgagagacagagcgagactcagtttcaaataaataaataatttttttgtttatttgactggagatctttctttctctctctctctttctctttctttctttctttctttctttcttcctttcttcctttcctttatttgagatggaattttgctctattgcccgggctgaagtgcagtggcgctatctcagttcattgcaacctctgcctcccgggttcaagggattctgctacctcagccttccaggtatctatgattatggtcacctgcaccatgcctggctaatttttgtttgtattttcagttaagacagggtttcactatgttggccaggctggtctcgaactcctgaccttaagtgatctatctgcctctgcctcccaaagtgctagaattacaggcatgagctaccgcgcccagcttctttttgtttttcagatacaggggtcttgctatgttgattttgaacccctaggcttaagcaatcctcctgcctcagcctccataagtactctgattaccggcatgagccatgatgcctagtcttatttttttatttcgaatttagatttaattgatttaccaggaatatttaactaattcccccgacaatttcactgtctcccctcccgctttcttgtctgtttgtgtgaatttcagtattttggatactcaaatggaatcacacagtatttgtctttttatgactggcttatctcacttagcgtagtgtctttcaggttcatctattttgtagcacatcaagaaatttgtatattcttttaggactgaataatattcttctatttgtctgtaccacagtttgtttaactattcatccattggtggacacctgcattgcgcccacctttttattatttttgaataatgctgctatgaacatgggtttttgttgttgttgttttttgagacagtgtctcactgtctcgcccaggctgaagtgcagtggcgtgatcttggctcactgcaacctccaccctctgggttcaagcgattctcctgcctcagcctcccaaacagctaggactacaggtgcacaccaccatacccagctagtttttgtatttttagtagagacagggtttcaccatattggccaggctcgtcttgaactcctgacctcatgatctacctgcctcagcctcccaaagtgctgggattataggcgtgagctatcgtgcctggccttgaccatgggtttttaagtatctcttcaagatgctgtgtttactttcattttatttttcatttgtttgtttgagatggagtttcgcttttgttgcccaggctggagtgcaatggtgcaatctcggctaactgcaacctccacctcctgggttcaagcagttctcctgcctcagcctcctgagcagctgggattacaggtgtgtgccaccacgcccagctaatttttgtattattagtagagacagggtttcaccatgttgactaggctggtctcgaactcctcacctcaggtgatctgcctgcctaggcctcccaaagtagtaacattaagggtgtgagccagtgcgcctggcctttttcttttttatctttatacccagatgtggaattgttgcctatactgatcatttgattttggattctttgagaaaatgtcatacttgtttccatagtgactgcaccatttcaattttccaccaacagtggcacaaaattctcctatttctccatattttcgacaacacttgtgattttctggtgtttcatttttttcccttttcttgacaaaacgtattctatatgggtgtgaggtgatattctttattggtgtgaggaaaaatattcagttttctatttgcatttctctctaatgatttgtgatattttgcattttcttatatggtcgtatatcacctttggaaaaatgtgtatttctttccacatttcttaattcgttatttgttttgctttgtaggacttatttatatatttttattttattattttaaataattatttatttattttttgagacggagtcttgctctgtcacccaggctggatgcagtggcgtgatctcggctcactggtacctgcgcctcccaggttcaagcaattctcccacctcagcctcccaagtagttgggattacaggtgcacaccaccatgcctggctaaatttttgtatctttaatagagatggggtttcactatgttggccaggctggtcttgaactcctgacctcaggtgatctacctgctgcagcctctcaaagtgctgggattacaggcatgagccaccacatccggcctatatatattttagatattaagtttttatcacagatatgatatgcaaatattttctcacatatggtaggttttctttacattgtggtaattgttttcttctatccacaatagttctcaattttgtcatagtgcatcgtgtgtatatttaccttctttcctgtactatcaattttatatctggggaaatgttgaatccaatctcatgaagctttttacctatggttttttctaggagttttatcgttttaggtcatgaatagactttaagttaatttttgcatggggtgtaaagtaagggttcagcctcattcctttgcttgtgggcatcctttttcttcagcactatttgatgaagtgactgtcctttccttgttacatggtcttgacattttgattgaacattattctaccaagtatttgagggtttgtttctggcttctctattcttgctttttttttcatttttgcatggggggatggattctcgctctgtcatccaagctggagtgcagcagtgagatcttggctcactgcaacctctgcctcctgggttcaagtgattctcctgcctcagcctcccgagtagctgggattacaggcatgtgccaccatgcctggctaatttttgtatttttagtagagatggggtttcaccacgttagtcagtctggtctcaaactcctgacctcaagcaatctgcccgcctcggcctcccagaaccctgagattacaggtgtgagccaccacacctgggtcattttttactttaatggagaattttatcctctcatttgggttaccagtactgtctggaatccttttatttcattttgaagggctccctgtagcatttcttgttggacaggtctagagtagtaatgaactttcttagctcttctttatcgaggaaaatctaaatttctcctttatttttgcaggtgacttttgctaaatatagtattcttggttgattttaagcactttcaatatgtcatctcactgccttctggcaggcaaagtttccgctggagaaagtacatagtcttataccttttcctctaaatggcaaatatcttttttgttgctcctgtcaaaattcttcctctgtctttgatgtttgataatttgcttataatgtatctctgtgtgaatgtccttgggttcattttaatttgaatggtcaagcttcttgaattgtatattcaggtctttcttcagaattgggatttggacaattatttggacattatttcttcagttgcaatttctgatcctctgtcttctccttgtgaacctctaataatttgtatgttgttgtgcttgagagcatccgaaaaatgtattagcgtttatttgcttttcttctctgttttttgtttttggtctttgtagctgatactgtgttttttttttttttttttttttttaaattagagtcttgctctgtagcccaggctggagtgtaatggctccatcttggctcactgcaatctctgcctcccaggttcaagcgattctcctgccacagcctcctgagtagctgggattacaggtgcatgcccccatgtccatctaatttttgtatttttagtagagacaggctttcaccatgttggtcaggctggtctcaaactcctgacctagtgatcctcctgccttggcctcccaaagtgctgggattacaagcgtgagccactgtgcctggtggagctgatacttttgaataactgacctttaagtttgctcattctttttggtgctctatccatctgctgttgagcacctaatgaatttttactttatttattgtgtttcagctccagaatgttttttgtttcctcctttgtttaatatcctccttctcatgtattgtttttctgatttcatttagttgtctatctctccttgatatcttttagctcattaagaatcttaaggcagttgctttaaatatttgtcaagggccaggtgcagtgcctcatgcctgtaatcccaacactttgggaggccaaggcaggaggatcacttgagccaaggagttcgagaccagtctaggcaatatcacgagcccttgtctctaaaagaacacagaaaaaacttgctgaggctggatgtggtggctcacgcctgtaatcccagcactttcggaggctgaggtggccggatcatggtcaggagttccagaccagcctggccaacatggtaaaaccccatctccactaaaaatacaaaaattagctgagcatgttggccggcacctgtagtcccagttactcgggaggctgaggcaggataattgcttgaacctggaggtggaggttgcagtgagctgagattgcatcattgtactccagcctgggcaacaagagcaaaactccatcttaaaaacaaacaaaagaaataacaaaaaaccccaaaacttgctgaatgtggtggtgcatgcctgtagacccagctactcaggaggctgaagcaggagagatcgcttgagctggggaagtagatgctgcagtgagctacactataccactgcactccagcctggacgatagagtgagaccctgtcttaaataaataaataaataaatatttgtctagtaatttagagagctgcctgtctttttctaggtttggctttatttattttttagccatatttctctttcctttcataggccttgtaatttttggattaggtttggtaaaataactgcttctctcagttgttttgtataagacttggtcagagggagatcttttctaattagcctgttgtaaagggtgtgggaacactcactccttttctggggatgtgcctttcctagctttgtgcatgtactgttattatgtatactgcttctcttgagtgtcttattttccctagagacttgtcccttctttttctcagaaggtttcaattcctgttctatctctctactcataatccctctcaaactcacctgtaatcctcctgactcctacagatttcccagaactccagtgcatcaccttacccttttctattttcagcacaaccagcgtgatgtacaaagtgtgctgatatttcttccaatgtctgagtcagatgaggcagattctagtattttcatcagactctaaacatgccagaattatggggtctgaattttacttttttcttgctttcctagggagcagctatgcattgggaagcaatgcagaagacaaaccaattaaaaaacaacttggagtatcctttcacttacatctgtctgaactggagctatttccagatgaaagggtaataaatggatgtaatcaagttgaaaactttatcaaccacagttcctctgtttcctgtcttcaagaaatgtcttccagtgtcaaaacccccatttttaataggaatgattttgatgattcttcatttctcccacaagaacagaaagtacaccttagagaaaaaccttatgaatgtaatgagcatagcaaagtctttagagtatcttccagccttactaaacatcaagtaatccatactgtagagaaaccttacaaatgtaattcatgcggcaaggtctttagtcgcaattcacaccttgcagaacattgtagaattcatactggagagaaaccttacaaatgtaatgtctgtggcaaggtttttagttacaattcaaactttgcacgacatcaaagaattcataccagagagaagccgtatgaatgtaatgaatgtggtaaagtcttcagtaataattcttaccttgcacgacatcaaagaattcatgctgaagagaaaccttacaaatgtaatgaatgtggtaaaggcttcagtcataagtcatctctagcaaatcattggagaatttatactggagagaagccttacaaatgtgatgaatgtggcaaggccttctataggattgcgctccttgtacgacatcagaaaattcatactggagagaaaccttacaaatgtaatgaatgtggaaaggtctttattcaaaattcgcacctagcacaacattggagaattcatacaggagagaaaccttacaaatgtaatgaatgtggaaaagtatttaatcaactttcaaatcttgcacgacatcgaagaattcatactggagagaagccttacaaatgtaatgaatgtggtaaagcatttagtgagtattcaggcctttcagcccatcttgtaatccacactggagagaagccttacaaatgtagtgaatgtggcaaggcattcagacacaagttatcactaaccaatcatcagagaatccatactggagaaagaccttacaaatgtaatgaatgtggcaaggtcttcaatcgaattgcacaccttgcacgacatcggaaaattcatactggagagaaaccttacaaatgtaatgagtgtggcaaggcctttagtcgcatttcatacctagcacaacattggacaattcatatgggatagaaactacaaatgcaacaaatgcgtcaaagaatttagtgtgcactcaagccttactacccatcttttattccatactgcaaagaaattttgcaaatgtaaagaatatgacaaggtcttcaaacacaagtttttctaataactcattagagaatttatactggagagacttcacaattataataaatgtgtggaaaagtcttcaaaaaaatttcacaccttgcaaaaggagatctaaaaaacacaatcagaaatgacaaaggggacattaccaccaaccccacagaaatacgaaaaaccctcaaagattactataaacacctgtatgcacacaaactagaaaacctagaaaaaattaataaattccttgaaagatataaccccccaagattgaaccaagaagaaattgcatccctgaacagaccaataatgagttccaaaatttaatcactaattaaaaatctatcaaacaaaactctggaccagacagatttatagttgaagcctacgagatgtataaagaaaagctgttaccaatcttactgaaactgttcaaaaacatggatgcagagggactcctccctatctgattctatgaggccagcatcattctaataccaaaacctgacaggcacaatgaaaaaagaaaacttcaggctggtactcctgacgaatataggtgccaaaatcctcagcaaaatactagtaaaccaaatccatctgcacatcaaaaagctaatccaacattatcaagcaggctttagtgttgggctgcaaggttggttcagtatacacaaatcaataaatgtgatttatcacatacacagaactaaaaacaaaaaccacatgaccatgatcatctctttagatgcagaaaggtttttaataaaattcaacatcccttcattttaaaaaccctcaacaaattacacattgagggaacatacttcaataagaaccatctatgctggactcacagccaaattaatactgaacaagcaaaagctggaagcattccccttgagaactggaaaatgacagggatgaccactctcaccactccgattcaacatagtactggaagtcctaagcttagtgatcaggcaagataaagatatgaaaggcatatataaataggaagaggggaagtcagtttctcttgcagaagatataattctgtatttagaaaacctgttgtctctgcccaaaggctcctagatctgataaacaacttcaaaaaagtttcaggatacaaaatctgtgtacaaaaattagttgcatttctatacaccagtaatgtccaagctatgaaccaaatcaagaatggaatcccattcacagtagccacaaaaagtataaaatacctaggaatacagccaaccaggtaagtgaaagatttctacaatgagaattacaaagcagtgcacaaagaaatcagaaacaataaaaattgaaaaatatctcatgctcatggataggaagaatcagtattgttaaaatactgcccaaagcaatttacagagccaatgctatttctatcaaactaccaatggcatttttcacagaatcagaagaaaacattctgaaatttatttggaaccagaaaagcccaacctaaatagcaaaagcaatcctaagcaaaaagagcaatgtttgaggtatcacactacccaactttaaaccatactacaaggctacagcaactaaaacagcatggtactggtataaaaaaagacacatagatcaatggaataggtaagagaacccagaaataaaggcatatacctacaaccatgtgatcctcaacaaaactgacaagcaatgaagtaagaacttcattcaataagtggtgctggcataactggctagccatatgcaggatattgaaactggacccctatccttcacgatatacaaaaatcaactcaagatggattaaagacttaaatataaaacctaaaagtattaaattcctagaagaaaacccaggaaatgccattctggacataagtgctggaaaagacttaatgatgaacaccccaaagcaattgcaacaaaaacaaaaattgacaagtgggacctaattaaactaaataacttctgcacagcaaaagaagctatttgcagactacagaatgggagaaaatgtttacaaactgcatctgacaaagatctaatccagaatctataaagaactcaaacaaatcaacaatgagaaaaacaaccccattaaaaactgggcaaaggccatgaatagacctttctcaaaagaatacatacatgtggcaataagcatatgaaaaaaatggttaatatcgctaatcattaaggaaatgcaatcaaagccacaatgagataccatctcagacctgtctgaatgggtattatcagaatgggtattattaaaaaatcaaaacatagatgctagtgaggctgcagagaaaagcaaatacttatacactgctggtgggaatgtaaattaattcagccattgtggaaagcactgcagcgatttctcaaagacataaaagaacatagcattcaacccagcatcccattactgggtgtatacctaaaggaatataatcattccaccataaagacaaacacttgtatgttcattgcagcactattctcaatagcaaagatgtggaatcaacgtaaatgcccatcagcagtagaccagataaagaaaatttggtacatatacaccatggaatactatgcagccataaaaaagaacaagactgtgtcctttacagcaacatagatggagctgaggctcttatcctaagtgaattaatgcaggaacagaaaatgaaatatcccatgttctcacttataagtgggagctaaacattgattacacatggactcaaagaagggaacagtagacacgggcttatgggtggaggttgggaagaggatgaagattgaataactgcctgttgggtactatgctgattacctggggacaaaattaactgtacaccaaactcctgcaacatgcagttgacccatgtacacatactccttgaacctaaaataaaacatgaaaaaaagcaaatttcacaccttgtaaaacatcaaggaatttatattgcaaagaaaccttacaaatgtatgtagcaaagcatttagtgtgccttcaagtcttaatattcatcaggtaatctgtaatgcagagaaaccttacagttgtaatggatatggggctgggcatagtggctcactcctgtaatcccagcacattgggagaccaaggtaggtggatcacctgaggtcaggagctcaagaccagcctggccaccatggtgaaaacctgtctctactaaaaatacaaaaatcagttgggcatggtggcatgcacctgtaatcccagctactcaggaggctgaggcaggagaatcacttgaacctgggaggcagaggctgcagtgagtagagatgaagccactgcactccaatctgggcgacagagtgagactctgtctcaaaaaacaaacaaaaaagatgtggcaaggtctttactcagaattcaaaccttgcaaatcatcacagaatccatgctggagagcaaccttacaaatgcaacatgcgtggtaaggtctttaatcagaattcacaccttccacagcatcagataattcattcacgagagtccttatagagtatggaaaactcttcattatgagttcttatattaatcagcgccagagtgtcgtactagagagaaatcatataaatgtatgtgacacaggctttatccagccccaccaagtcactggacgtcaacacatacatctttgaggaaaccataggctgggcgcagtggctcacacttgtaatcccagcactttgggaggccaaggtgggcggatcacttgaggtcaggagttcaagaccaacctggccaacatggtgaaaccccatctctactaaaaacacaaaaattagctgggcatggtggaatgcacctgcaatcctagctactggggaggctgaggcaggataatcacttgaacccaggaggtggaagttgcagtgagctgagattgggccattgcactccagcctgggaaacagagtgggactctgtctcgggaaaaaacaaaacaaaaccataaagatggattgtggattgtggatgcaaagggtattaatcaaggaccataactattgaacatgagagcactgagcatttacagaagaaataactcagtctctagtacttccgtattaatatatgacatagcatgttgcagaaaaattacaagccaaaagataccaagcctcatgatgcaagggtatgtggaaattgcgatttttattcaggttattaaaatatttaattccttgggagttttggaaaggctactttactctttatgactttcagcctaaacttaaaactctcattatgtgcttttcctacaggcctttcactgtggtctctgggaaagaatcaacagcatgacagggctgattttattagctggggagcatttctatccagtttcctggaagaaggacattgccttttcaggttaaatattgtttgatttagacagcatggaggtgagcagagaataacaaaactatgtatcagtcatcctacttactgtgttcagcaaacctttttcctgacaggcacagtgctataaacctgtacagcaggttacactactgaatactgtaggcaattgtagtaaaatggaaagtatttctgtgtctaaacatagaaaagttaccataagaataccatatgaggccgagcgtggtggctaatgcctataatcccagcacttttggaggctgaggtgggcagatcacctgaggttgggagttcaagaccagcctgaccaacgtggagaaaccctgtctctgctaaaagtacaaaattagccaggcatggtggtgcctgcctgtaatcccagctactcgggaggctgaggcaggagaattgcttgaacctgggaggtggaggctgtggtgagccaagatcaccccacattaaataccatataaaagaaacaaagtgcacctatatagggcacttaccatgagtggagcttccagaactggaagttactctgggtgagacagtgaggagtagtgagtgaatgtagaggcctaggacacactccacactactgtaggctttagaaacactgtacacagctgggcacggtggctcacgcctgtaatcccaactctttgggaggccgagatggctggatcacaaggtcaggagtttgagaccagcctgaccaacatggtgaaaccttgtgaacactaagattacaaaaaaattagccgggtgtggcggcgcatgcctgttatctcagatattcaggaggctgaggtgagagaatcacttgaatccagaaggcggaggttgcagtgagccaagatcatgacattgcactccagcctgggtgaccgagcaagactccatctcaaaaaaaagaaaagaaaaaaaaaaacaaaacactgtacacttaggctatactaaatttattttttaaaaataaagtaattgtgctgtgatgttaccatggctgcagtgtcactaggcattagggatttttcagctccattgtaatcttatggtaccaccattgtatatgtggtcagtagttgaccaaaacatcattatgtgatgcatgactacttattttcactgatgtcctttgccattttaaagtgatggaggtctttgtaccataatatgttaggctaagtaatgggtttctgaaacatgttaagagacaaaatactgtaagactgaagttaaattattactgattacatatcatataatggattaataatgaaggaatatttaatttaggaataatgtaattattgaaattgactgggctgggggcagtggctcacacctgtaatcccagtactttgggaggccgaggcaggcagattatgaggtcaggagttcaagaccagcctgaccaacatggtgaaaccccatctctactaaaaatacaaaaaaattagctaggtgtgttggtgggtgcctgtaatcccagctactcaggaggctgaggcaagagaatcacttgaacccaggagacagaggttgcagtgagtcaagatcacgccactgcactccagcctcagtgacagagtgagactccatctcaaaaaaaaaaaaaaaaatgaggaaaagacaaacactaaaagtggcatctagatttttttttttaagatggggtctttctctgtggtccaggctggagtacagtggcgtgaacacaatccattgttgcttcagcctcccagactcccaagtagcagggaccacagccgtgcaccaccatacctggctaatatttatttatttagtagagacagagtgttgctatgttgccaggctggtttagaactcctgggctcaagggagcctccgaccttggtctcccaaaatgctgggattgcaggcatgagccaccatccaccagattttttttttcttttctttttaacagagaactatcacaagatacatctgaacctgcaaactgccaattcccagatttttttcatctgaaactcatcataatgctaacttttctacaaacagatattgcctaaggccaagagggataatagtttcactataatcagcagacctcagatattttctgtggatagtactgtatccatgaagcatatgatatgcccacctttcagaaaaaaaataagttatttatattgcagccattgcctctcagacattcagttttttgatataattgtcacatagttatatttattcatcatgacatgaaaagaggctctatactgacacctctattatcctgaaaatcatgtttgtaatttttgtaggctggataaacttcacaactacaattgcagtgtgatttaaatatcagataatagtatagaataaaacatcaaccatcaccacaagtgtggattacattaaattactgtcagaggtattagggatttgtatagacgggaggaccaagtgctccagattatttcagcaactcattgggatgtagctctggactagtttaaaatttttttttttttttttttgagatggagtctcactctgtcacccaggctggagtgcagtggcgtgatctcaactcactgcaacctccacctcctgggttcaagtgattctcctgcctcagcctcccaagtagctgggactacaggcacacgccaccacacccagctaatttttgtatttttaatagagatggggtttcacaatgtttgccaggatggtctcgatcttgaccttgtgatccacctgcctcggcctcccaaagtgctaggattacaggtgtgagccgtcacacccagctggacccgtttttatgaagaattttctgacataagcacttctccagattcctgaaggcctccttaccttcacagatgcgcctctcagaacaaaatagaaaatactcaccagactcttttctgctcccaggatggtgggctcagtgtgaaggttataacagccagtatatctgtgagagggagacagccaggccctgagataaaggtttgtgattctgcgacctcacctccccgaagaaccacagttattagtttacctttagcaaaattgcagtgcatgctaggaaagtcaaaaatattttttctaataatttgtttccattctcaattaccagaaacaattacagtgtctagtgagcatctccaaagagactaatgcagtatttagaagaggcttttttatttccatggaccctggaagcagacaggggctcaggtggagagtgcaggacacgctgaggtctgagccatgagggactctcagcaaattgtacacctcacgcgaccttctgcttccttgagttctgctcaaaatctaactttttcctgactctgagaaccatatgcttccagaccccttctagattatgggaaggcaaatgggataccatgaagagaccaagaaggatctattaatgcactaagagtgaaatgaagaatgtgatgtcaataattgatagtctgaaacattaaatggcactttctgatatacatgaatgattaaataaataattgggagataagagacccaactcctatgcagaaaaattccaaataactcttgtagacactccacctccaaggaggtggaatacacataactcccaactccacaaatgcaggctgcacagtgctgcttccttttaaacaatacaatatggcagggagagaatgtgaggatttttatagctgagaaacctgacagacacagcctcagacaggtgatcaaggttgacatccaaaggggattaagtaatgttaatagtatacacctttgataggatgtgataaaaatggcacttctcattggtttttctccccagtatacttaacctttgtctaatcatggaaaacatcagacaaatcccaatagagtggcagtccccaataacacattgacagccctgctacctaaccagtactcctcaaagctgaccaggttataaaaaacaagagtctgagaatctgttagagccaaggggagcctaaagacacataatggttaaatctaatgtggtggcctggacaggatcctggcagagaaaaggtcagggagccgaaggcctgtgggacgtgaccaactcagcattcctctggaggctatatgatcaaacagcaaactgtttatcaagaatgcaggatatgggcaaactcacacttccctgccaccaaaaggtttgctgagggacatgtctcccttgcaccgggctccttgaagttatctaatgagaaatctagcacctattattcaaaggatgcagtcttgcaagcctgctgtgaaccaaacggctgactgacaattacctgacaatcaccctgcctttctcgctctctcttttgcctaataaatatggagggctgtgtaaagctcagagcccttgtccactagaggcaaatatactctcttgtcttttatttccacatttgccccctttgttcaatccccctaggtccatgtgggttacaagtggcgcctgaacagggacagaattgggtgctttataagtggcatcacgaagtggcaccctgaacagcgacagtggcatccaaactcgggactatgaggacataaacgaagaaggtctgctggagcagaggaactgaaattgacaaggtgaacaaggaccccgggacgagtctgccggcagcggatataaggtcagtgccctaaagaggtactgggagcagtgctttaaagaagtactgggaatgggaagttttctgaatcagggtaacaaggggaataatttgtctattgaagaaacattatttgcagttgtaaagttctgttgagacagtctggagctcaggttaatttgcagacactaactaacctcctgcagaagccccaaaaagctattatgcgtaacccatggtttccataggcaagcactcttgatgtggaaaactgggatagagcaggagatggattgaaacaggctcatcaaaaaggttttaaagttgattcttcagttttttccacttggagttcagtttgtactgtatttctgccattatcatcttcttattctgtgggacagcaagctgaatctaaaaatctgaaagaatatgttgctctacccacagctccaactgaaaataaaaaacaggagaaggaggataaaaattgggctatacagcctcctccaattgcagaaacatttgtaccaccaccttcggtggcagaaataagagaccctaatacaaagaattttatgctctgctgtcatagctggagagcccttaggaccttgcacttttcctatttccgtaagacctgatccatataatccacagcagtttattcatgaacacaccccactagaatttaagttgttgaaggaattaaaaactagtgtggtcaataacggagtacaaagcccatggttcctggaggaaggaatgctagacgtagaactctgagaacaagtgaggagaaatcttaacatcaggcgcaaaggcatcaggtccaataaaatctttaatgttacgggctttaattagatcagcctttgctcagttacacacagaagagcctaaaaagaggaaggaggagaaaacatcacttgccttatcacctcctcttccctcagccccagtatcatcaggccaaaataacaaagaggaaatggaagtcttacctaagcctcctcttccaatagataggacaaaggacagaggatacactacagctatcagtccctgtgttaagcaggcaacattagaaggagagctcttaacctgctcagtaatgcaaaatcggcaaggcaatcaggtgtatgtttataaaaagataagaaaaaacgcattagaagccgaaactgcgcagccaagcaggcagtaggtggaagaaaaggctcagcagcagaaaagctcccggtaaccaagccgacaaggcctgcccaggctggcaacatccccctggcaaaggagggagggaccggcgcagacacaggcaaagcctaagaaagtacaacatggctgcctcccaggacctgcaccgctgccctctggctctgtgggcagcccgtagcaaaatttcatgtgttacgtcccaggctatgattctctgctaagatttaagtaaaatgtaagaatttgaaaaacctgctttctaataatggtcactgttgttacctctcttctatccctgacgtagctttccaaattcaatttaagtaaaatagtaacctctgaagggagagagattacagagggcccatgaattagttaaagagtaattaaaagctaggcatgtaaaaccacacattactctttaaaggagaactttaaacctaattaaatggtatttgttaaattaaaaggtaaaaatgctgtgcccttctcagaaagtgaagaaaagttgtatgtaagtgtagtgaaaaacttatgcatgaatgactgtcttaacctactgattacagatagtctttgatttgtgcttgctaaaagagtcctaaattgagttctccagctatggagtcactgttttcaagactgtttgccagattaaactccataaacttggtcacatcccacaggccttcagctccctgcagaaaagaacatgagttaaaaccaaagaaatcagaataaattatgaataagttgatggtagtatatcaacaatggtttataaactgtaaaacccatacaaaactagtataagatgttaataatagggaaaacgggtcagggtatatggaacttgtctaccttttttgaattttttaaatataaatctataaatcttctaaaataaagtgtattagttttttaaataactaatttaggccgggcttggtggctcacgcctgtaatcccagcactttgggaggccaaggcaggtggatcacgaggtcagaagttcaagaccagcctgaccaacttagtgaaatcccgtctctactaaaaatacaaaacttagccaggcatggtggcacgtgcctgtagtcccagctactcgggaggctgaggcaggagaattggttgaacccgggagttggaggttgcagtgagctgagattgcgccactgcactccagcatgggtattggagtgagactttgtctcaaaaataaaataaaataaagtaatttataaaattaaatgaatattgactggaaacacagatgaaacaaattttctaggaaaatgtactctaccaattttgacagtagtagagacagaaaatctaaacagaatgtaagatgaaacatataagatgatttaacagagaaattgcaccaatctttcaggcaggagaatcacctgaggtcaggagtttgagaccagcctgtccaacatggtgaaaccgtgtctgtactaaaaatacaaaaattagccaagcactgtggtgcaagcctgtagccccagctacttgggaggctgaggctggagagtcgcttgaaccggggaggcagaggctacagtgagctgaaaccgtgtcactgcactccagcctgggtgacagagcaagactctgtctcaaaaacaaacacacacacacacacacacacaatgtaatttacatctattttttaaagttattggtttttttaaaagcaacagttgggccgggtgcagtggctcacccctgtaatcccagcactttgggggccggggcgtggggggggggtgtggatcacgaggtcaggagatcgagaccatcctggctaacacggtgaaaccccatctctactaaaaatacaaaaaattaggcgggcgtggtggtgggtgcctgtggtcccagctactcaggaggctgaggcaggagaatggcgtgaacccaggaggcggagcttgcagtgagcctgggtgacagagcgagactccgtctcaagaaaaaaaagcagttggtggtggcctaacatccctccggggacaggacccatcgccgaacgatgggtatggtggcatgtgcctgtagcgtttttaacacacagggaagcgaccgccagactctcacggagatgccccgttcgttctgccttgggccaggtaaatacggattcccaggttggccttaaccctccaacgcgcttggcgttgtccctcggaaactctctagagatgagcactctagagatgactcagtggactgggaaaggcagacccacctcaatttgggtgggcacaatctaatcagctgccagcacagtcagaataaaagcaggcagaagaacgtgaaaacactagacgggcttaacctcccagcctacatctttctcccgtgctggagatcagagatgatgatggaaagggagaagatttctattatgttctgtgggccgtcagcatgaaattgcacatgctacccaggcagggctttgcatttcacattttaacttgcatcgccttcacacagaattccaggccttttaaattaaattgttaaaattagtttttatttacttatttattttaggacagagtctacactgagtatagcactgggtctacactacgcccaggctggagtgcagtggccatgatagctcagtgtagactcgaactcctgggctgaagcgatcctccagcctcagcctctctagtcgctgggactacaggtgcctgccaccacggccggcttaaaattgattttaatagcaggaaatttcctggatctaatcctcaactgacgttgctttgctccggcaggatcccagtttgcagagggctgagctgctccagcctcactgccagcaaaacccggaaaacagaggcactggaggcgtggcctagggaagccccgccccgtcccgtcccggtccgctctctatgctgcgcgcgcgcagttttttgcagacccggaagcggatcgcgtgggtagaaggtcacaccgcagcgcgtcagtttccctttgtttagattcaatctgggcttcccagctcccccgcgcttctgtacccgggatctgagagtcaacacagaccttgaaatccccgcaccgctccctccaccccgtgtaaattcaggcgtctccgtgagagtccggcgctcgcttccctgtgtgttaaaatcgctcggcgacgggtcctgtccccgctcgttctgccttgggccaggtaaacacggattttcgagactcctttccgcttaaaactctttactgacccaacgtcctgccccgcgcttttaaaagtccttaccgcaaggtggattcccgcccggggagcctcccaacctcgcccccggcccctgaagcgcagcgccgcagccccagtcccggcgggggaggccgcgtcctgtactgggtcctgggacccttgagaccccacacttctaataattcagccccacccttttcctccttgatccgggccttcctactccccaggcctccccttcgcagccatcgctactcccgacccccgggtgtggggacgtgacttcttctgtcttaggacattcaggattcttcgtcccaaattccatcccactaaaaatgtgctcttggcggaggtgggcaccttattgtactcccctgcctatggatgtgtggggaaagatggtgaaagagtggcaggaaatagaaaaattttgaaaaagaagcatgagggagatccataagcagacggcagagagtagctgagagatttacagagacagtgaatgaagccgagaatgtagcagggggagaaaagtaactggagaaatgtagagaaaagctgggtctccagagagatgaagatgaagcaagattgggagaggggcagaaagggggaggctcctcagacagagtaggggagaggaggagggatttggagccagggcagacagagcagcatggtgctgggacagcaagagggggcagctgatgacaaggagagcagagggagaaccacagcatggggaggcctgggatccgggggggccagagagtggggacaagagagtgtagcagggaagaggaaatttaacagggagaacagagaggaagcagagatagggagggcaagaaacaggcagaatggaaattggggacaatcaaaaattggacacaaagaggaacaaggggtaaaacaaattgccagaatggagcagaacaaatggaagagaaggaatagagggaagagggggagaaacagcaggagaggagaggggcagaaaaataagccaattcttatgggaaaaatgaagtgaaaaaaagcaggagaaagaaggtaagaatgagagagctgtacagaatgagggagggaaacatactaatgacaaaagagggggaacctgagtgcagatgagcgatgagttgatggactattatgatcaaattgtgatatactgatttctctaattgtaatctaataagcacaaaatttatttcaaaagtacagatgaagatgagacttgcaaagttcctgcctataagggaagtgcattttataattcttgacatcacaagttagcttccattcacaatccctgttcagccagagggcagtgacttgcctcattcgggtgtgggtgagtgggtaagacaggaggaaaaaccaaagcgtttttcctacgcttacaatcaacacaatagtgaacacccaacacagaatgccacatctctggtcaccaaaatgtgttggggattacttcccacccacaagcagttcatcagacaccacctgggtgttgtgtaatttaactcaatttcacactaacactatctatgtggagttagcctcagattctacaggttgagagctcagttccacaggcatgctcccacttcaggtgccacttgcaagtcctgggttgggacttgaaccttgtgaccaaccaactatgaaccgggggttcccatgaccctttcctcacattttgtgaatttgctagagtggttcacagaactcagggaaactttttgcttagtttcacccatttgttacaaaccatattacaaaggatacagatgaacagccagatggaagagccttcctagcaaactaatcaaaatgaggggcttttggaccaggcgcagtggctcttgcttctaatcccagcactttgggaagccaaggtgggcagatccacttaaggtcaggagttcaagaccagcgtggccaacaaggtgaaaccccatctctactgaaaatacaaaaattagctgcgcatggtggcgtgtgcctgtaatcccagctgcttggctgagacacaagaatctcttgatcccaagaggtggaggttgcagtgggccaagatcgcaccactgcagcctgggcaacagtgagactctgtctcaaaaaaaaaggaggggctcttagtaaacatgtttttttttctttgagacggagtttcggtcttgttgccctggctggtgtgcactggcgcgatattggctcaccactgaaggggtggcctgcccctccacacctgtgggtgtttctcgtcaggtggaatgaaacactcagaaaaagaaagagacacagagcaaagtacagagaaagaaaagtgggcccaggggaccggcgctcagcatacggaggacccgcgccggcccggtctctgagttccctcagtatttattgatcactatctctaccatctcggagagggggatgtggcaggacaaaggtaatagtggggagagggtcagcaggaaaacatacgaaccaagatctctgtcataaataaggaaacgtgctgtgccttgatgtgcatgtatacaaacatcttggtgcagtaaagagcagtattgctgccagcatgtctcacctccagccctaaggcggttttctcctatctcagtaaatagaacatacaatcaggttttacacctagacattctattgcccaaggacaagcaggagacagatgccttcctcttatcttaactgcaaagaggccttcctctttcactaatcctcagcacagaccctttatgggttccaggctgggggatggtcaggtctttcccttcccatgaggccatatctcaggctatcacatggggagaaaccttggacaatacctggttttcctaggcagagttccctgcggccttccacagtgtattgtgtccctgggtactcgagactggagaatggcgatgacttttaccaagcatactgcctgcaagcgctttttaacaaagcacatcctgcacagccctaaatccattaaaccttgagtcaacacagcacgtgtttctgcgggcacagggttggggctagggttacagattcacagcatctcaaggcagaagaatttctcttagtacagaacaaaatggagtctcttatgtctacttctttctacatagacacagtaacagtctgatttctctttcttatccccacacaccacaaccattgcctcctgggttcaagtgattctcttgcctcagcctctccagtagctgggattacaggtgcccgtcaccatgcctggctactcttgtatttttaatagagatggggtttctccatgttggtcaggctggtcttgaactcccgacctcaggtgatccacccgccttggcctcccaaagtgctgggattacaggcgtgagccaccgatcctggctggaaaccatgctttttatctgcatctaaactgaggggcagccttgtgggactgcacctttaacccgtggaatctgtgcctatctccaagtagacagtagcaaagttgagttaacctgtgggacacacagctgcgagcgtgccacagaactggtcagcacgggccagacgcgttggcttaagcctgtaatcctaacactttgggaggctgactcaggcagatcacttgaggtcaggagttcgagactagcctggccaacgtggtgaaaaataaaaaattagctgggcgtagtggcttgtgcctgtaatcccagctactcaggaggctgaggcagggaattgcttgaaccctggaggcagaggttgtggtgagctaagaccgcgccactgcactccagcctgggcgacagtgaaactccgtctcaaacatgggggaaaacacacattttggtgatgggcggcatagtattctgtgctgaatttgagtgtagtaaaaacagttatcttttttccttacctcaaacagtaaagggaagagacttggcccaccagtctcagggcctgtgatgtctactcaatagtgatggaatgatctgtccctgctcctggctgctgctgatcctgagactgtacaccatgtgccagccccacttacagtctcagagtggaatgacatccctcctctatggtgtcgttaatttttttgtctaggaaattattattattattattattattatttgagacggagtctcactgtgtcacccaggctggaatgtaatggcgcaatctccactcactacaacccctgcctcccgggttcaagcgattctcctgcctcagcctctcaagtagctgggactacaggcacacgccaccacgcctggctaatttgtgtatttttagtagagacggggtttcaccatgttggccaggctggtctcggactcctgacctcaggtgatctgcccgccttggcctcccaaaatgctgggattacaggcgggagccactgctcctggcctagggaattattttggtcagcatactgaaatggaggtgttgtccactgaaacacacacactcacatactcactcactaaagccttttcgttccatttttcaatctttaaaacaaaaaatactgtatttactacatttctccctgcagtaagtacccctcttgcatgctctatttaagatcacagtacactaaaatcttgtttatattctctcttcaattcttgcccctagttcttggttgactccatccaatcaagttatcgcatccacccattccattgctcctgcgacctgtttctaaatttatttttatttttaaaaagttttattttttatttttattttttttgagacagagtctcgctttgtcatcaggctggagtgcagtggcacgatctcggctcactgcaacctctgcctcccggattcaagcgattcttctgcctcagcctcctgagtagctgggattacaagcacacgccaccatgcgtggctaatttttgtatttttagtagagacggggtttcaccatgttggccaagattgtctcgatctcttgaccttgtaatctgcccgcctcggcctcccaaagtgctgggtttataggcatgagccaccgtgcgtggcccctaaatttatttttaattaattatttatttttttaagggacggggcctcactctattgcacaggctggagtgcagtgaggcaatcatagctcactgtaacctcgaactcctaggctcaaatgatcctcctgcctcagtctcccaagtaggtaggactacaggcatgcaccactatgcctggctaatatttttatttatttacttatttatttatttttgagacagggtcttgctcccagtctcccaggctggagtgcagtggcataatcacagctcactgcaacctcgacgtcctgggctcaaacaattctcccacctcagcctcctgaatagctgggactacaggcccatgccagtatgccactaatattttggttttttatagagttggggtcttgctatgttgcctaggctggtctcaatttcctggcctcaagcgattctcccatctcagccacccgagtagccaggactacaggtttgtgccactgtgccatgctaatattttgatttttgtagagttggggtcttgctgtgttgtccagactggtcttaaactcctgagctgaagtgattttcccacgtcagcctcccaaaatgtatccagatggaggcatcattcattaaaacacattcctacataaaataaaggttttattttccttctactcttctatctttaaaacaaaaaatattatattaactacatttcttcctctaggaagtacccctcttctgtgctcccaaatctctggaattacaaggatgagcccctgcaccaggcttaatagtttttaaatttttgtcctcatctttctttccctgtcagcagcaatttgcacagccgatcactccctcttcttttttcttggctttgaagagattcttcataatttaaaaaatctgtttaactttttttttttttttttgagacggagtcttactctgtcacccgggctggagtgtagtggcgcaatctcggctcattggaacctctgcctcccgggttcaagtgattctcccacctcagcctcctgagtagtcccgagctgggactacaggtccgtaccaccacacctggctaatttttgtatttttagtagagatggggtttcactgtgttggtcaggctggtcttgaactcctgacctcgtgatccatccaccttggcctcccaaagtgctgagattacaggcgtgagccaccgcgcctggccctgtttaacatttttgtcatcaccttcatgtctcctgaactgtcttctgtgaatatgggagtgtcccacaatttagtccttaaacctgttctctctgcccacaccctctacctttccttatgatctcgtcttacagcttcaaacaccacctgcctgtctccattttccctctccacccacccctctctcctgaattccagaatcctgtgtccactcgtgttctggacatctctgctggggcatccacaggcatctccaccttcatatgtccaaaagagaccctgaactccccaaacacgtatccccagcagtcctgcacatatcagatgagggacaccctgtactttctgggaattaagtaaacctgtcaaatgtatttaaaatgtaggagatattttcttatttgtgttttcatttataatacaaacaataaatcacatgtttacttacatgcctgtaatcccagctacttgggctaaggcaggagaatcgcttgaacccagggggcagaggttgcagttagccaaagatcacgccctgcactccagcctgtgcaacagaatgagaccctgtctcacaaacccacacacaaaattatccggctttggtggcaggcgcctgtaatcccagctactccaggaggctgaggcaggagaattgcttggacctgaggcagaggttgcagcgagccgatatcatgctattgcacttcagcttgggtgacagagtgagactgtctcaaaaaaaaaaatgtatttgctcagttaggatggaaataggcctgtatggaaagtacagttaatgtttgagttgtaccttgatacaagcagtttcttgggagaaatggcatccagcccagtggagacccgcaagaacaggtcatgtccatacattcccgctagagggcagtgctggtgttggtcgaggcttcggaggtcaccttgaaggctaacggtgtgatcattggagaacagctggcatacagccacgtctcagtgtaggctgcaggtcttcagagaggcccctgacagcagagtgtgtcgcagcctctggtctcacagtgcctgtcaacctcttgaatttctgtgtattttgaattccagtagtcgaggtcagaatctcatatatggggtctgagaaggtgccatataacattctccaggggagctgggaatccaaccacattctctggggtgggagggaagtttactccatttcctatttatgggggctgctaaggggtgatgcatcactcgtgaaggaaggaggaacacactccaagttcttatcacagcacacaagtcattcatgtagcaaactatgtaagtggaatcatttgaaacctacataacagggggcccaggtttctcctgcctcagagacttcatctgggctgttcctctgcctggaactctctggcccctcagctgcaggtgacaaacacccttccttccccaggcctttgttctggtagtaccttcttaggattctgtgacccccccatagcccccgatttaacactccagcctgaccccaccccaactctcctccattttgaagctgtgtgtgtttctttctttcccttttcctgccactgtctggatcctggtgacagcaaggacccaaggggagagacgagccagaaggtggggactgtgctggctcaacccctctgagtggagctcagccctagtctcacatttgagagctgaggcattttgcagaaacatctcttgtgcctccttacagagattctgatttcaatactcaggtggaggccaggcctaatatttaaagctgatgctacagtagttgctccctatctgctggtttgatttctgtggttccagatcctcgagtttaaccgtggtctgaaaatattacacagaaagttccaaaaatgaagaatgtacaacttttaaatttcttgccattccgagtagtgtgctgaaatctagcactgtcccactctcttttgtttttgaggagtctccattgcccaggctggaacgcagtggtgcaatatcggctcactgcaacctctgcctcccaggttcaagtgattctcatgcctcagcctcccaagtagctgggattacaggcatataccaccacaccccactaattttttgtatttttagtagagacagtttcaccatgtagcccaggctggtcttgaactcctgagctcaggcaatccacctaccttggcctcccaaagtgctaggattacaggtgtgagccactgtacccggccagtcccatgctattttgcccaggactcgaatcatctccttttctggtatatctaggcagtacagtcatccctcagtattggagggattacttccacgacccctgaggataccaaaatcaggtgatcttcaagtcccttatgtaaagttgcatagtacagccatacactgcataatgacattttggtcaacaatcagatctatgatggtggttccgtaagattacactgttacactggagatgagaagttcctgttgcctagctacatcagagtagtcatgacgtcatagtgcagtgcattccttgtgtctgtggtgatgctgggggaaacgaacctagatcgttgccaggcagctttaacctgggtgtgggtgaggatgacactgtgatgctcctagaggtggttcatgaggaatggacgaataagtggttggaactgatatgagaacacatagctgaagaagaggtgagaagataggaaagtgaaggaaaagaaaaaaaaaatccaggaactttcacagtgaagggtttagcagaaacttgtacagacctcaacaagcttcttaaaaagtttgaaaacatgaactccaacaccaataggtgtttatttatttattttatttttatttttatttttttttggagatggagtctcgctctgtcgcccaggctggagtgcagtggggtgatctcgactcactgcaagctccgtctcccgggttcacaccattctcccacctcagcctcccgagtagctgggactacaggcgctcaccaccacgcccagctaattttttgtatttttagtagagacggggtttcaccatgttagccaggatggtctcgatctcctgacctcgtgatccacccgccttgacctcccaaagtgctgggattacaggcgtgagccactgcggccagcttattttattttttgagacagagtctcactctgtcacccaggctggaatgtagtagtgtgatcttggctcactgcaacctccgctttctgggttcaagcgattctcctgcctcagcctcctgagtagctgggattacaggtgcctgccactacacccggctaaagtttgtattttgttttttttgtttttggttttttttgagatagagtctctctctgttgcccaggctcagctcactgcaacgtctgccttccgggttccagcgattctcctgcttcagcctcctgagtagctgggattacaggcatgcgccaccatgcccagctaatttttgtatttttagtagagacggggtttcaccatgttggtcagtctggtgtcgaactcctgacctcgtgatctgcccgcctcggcctcccaatgtgttaggattacaggcgtgagcatggggcccagactaacgtttgtatttttactagaggcagggttttaccattttggccaggttagtctcgaactcttggcctggtgtgatcagcctgcctcagcctcccaaagttctggggttacaggcgtgagccaccacacccaaccccaaaaggtgtttattaatagaaaggaaagtttatggtgcattacctgctcacaagaacatttaggaagaaaaaataagcaagtaaaccaccatagatatttttcttcctctctcgttttcctaatcagctgatttatttttttattttttgagaccgagtctcgctctgtcaccaggctggagtacagtggtgcggtctcggctcactggaacctccacctccagggttcaagcaattctcctgcctcggcctcctgagtagctgggactacaagcctgtgccaccactccgagctaatttttgtatttttagtggagatggggtttcaccatgttggccaggatggtcttgatctcttgacctcaagatctgcctgccgcggcctcccaaagtgctgggattactggtgtgagctactgcaccaggccctcagctaactttcagattcacaccacagacatatttctgaaaggagtgccttctctcctagaagagcctcgggcaagttcttcaagaggtatccagaagaagtcattgttatcccagatgacagctccatacatgttattgctcctgaggaccttccagtgggacaagatgtggcactggaagacagtgacattgatggtccccaccctgtgtaggcctaggctaatgtatgtgtttgtgtcctggttgttgacaaaaaagttttaatggggaaaaagattttaaatgggaaaaagcttatagaataaagacatgaagacaaaatatttttgtacagctatataacgtgtgttttaagctaaatgttattgtagaagtcaaaaagtttaatttagaagtttataaagtcaaaaagttatagtaagctaaggttaatttgttattgagaaaaaaatattttttatgttagtgtagcctaaatacacagtaagtatgtatttatttttgagacagcctctcacactgtcgcccaggccggaatgcagtggtgcgattatggctcactgcagcctcaacctcttaagttcaggtgatcgtcccaccacagcctcctgggtagctgggactacagatgtgttccaccatgccttgacttatttcttgtatttttttttgtagacacaggagtgttgccatgttgtccaaactggtctcgaaattctggagtcaagcagtctgcctgcctcgttctccaaacgtgctgggattacaggcatgagccactacgcctggccaagtattcggtatttataaaatctacagtagtacacagttatgtcgtaggccatcacattcggtcaccacacactcactgactcatccagagcaatttctagtcctgcaagcgccattcatggtgagtgccctagacagctgtaccattttttaaacatgtatatcatattattattgtaccttttctatgtcgagacatgtttttatttacaagtacataccattgtgtcacagttgcctgtagtattcagtacataacatgatgtacaggtttttagcaataggctataccatataccctaggtgtgtagtagactataccatcttggtttatgtaagtgcagtctgtaatgaaatggtctgaaaacacatttctcagaaccggtcccattactaagcagtgcatgactgtatttgcatataaattacacatgtcctcccgtagactttaaatcatctcttgattacttataatggattatttttaatggattaatgaaatttataaatgctatgtagttgttatactctgttgttttcttgtattattttcattgtttgttactttttggtttctttccttttttttgtaattatttcagtctgtcgttggttgaatccctggatttggatcctagaaatactgagactgagggccgagtgtagactctatctgctcattagtcagtgaatagtcttctttttgatctgctccacttttggggtacctcagtccttttgtttaacccttattttacttaacagtattccccaagcacgtgaatattgatgctggcaatttggatgtgccagtaagaagctgtcacatgcataatttaagtggagtaaatagaggtcagtactgtttgaggttccaggcatccactgggcatcttggaacatatcctcatggatacggggattccagtgtgttctgtctctggcgctgagcaccaacgctctgtgtcctccatttctgagggcttacatgagcctgggatccatagagaggggaggaggggctgtgctcttcatggagtttggtcacagctgtgtctcttccctgaatggggcagctcagtccagcctagctccctactgctgtagcgtgtgtgcgggcttctccaggaggggagcgagtcctgaataaaagagtaaaaatttcactcattcttcctgtaggaatttcttgtccctgcatcaactctggtgcagtgggcaacagaggacatctttccgcaggattaggtctaacctgtgtgtgtggttgtggcatagggaggggaatgtgttgattccgagcagtaatcagtgtatttttgacatttaggattgacttataaacagtcatgctatgtgatgaagaagcccagaagaggaaagcaaaggagtcagggatggctcttcctcaggtaaagtgatattctcggtggttggttctctctgtttctttctgaaatgcctgaagcatcctgcctgacacgtttgctcacactcacccatgccttccctcagtccctttcatctcgcttagattctatctctcgtgacccagtgacatgaatgtgggaagagactgcactgggcgtggtcctgggaagggctcacacccagacatggatggagacggggtgagggtcccgtggtgtcagtggtgttgggcagcagggattgttcaggggccacatctggatgcactgtcagctctctgtggaccaggattagagaggctgccaatggaagtcacgtatttttttttttttttttgagacagagtcttgctgtgtcacccaggctggagtgcagtggcacgatctcgactcgctgcaacctccgcctcccgggttcaagcaattctgcctcagcctcctgagtagctgagattacaggtgcctgccaccacgcccagctaattttttgtatttttagtagagacggggcttcaccatgttggtcaggctggtctcgaacccctgacctcgtgatccacctgcctcggcctcccaaagtgctgggattataggcgtgagccaccgcgcctggcctgaagtcacatattaatgcacacaagtacctggtacattctggaaaaggagttcaggaaggagaaatcttttctgtctgatttttactacatttgaagctaaacacctttcctactttctaatgtctggcttggttcagagaggacattctctcttctttctcagcatgcccctcccatggagactggtgttcctgcagggagtcttgtacagcatctgtgttaggtgaaaaaagctgtaattttgcacagagattggagcataaattttttgtcattaaagaggtggaaattatattcattcttgttccagcaattagttatttttttatgttaaacatcaaattatgtatatatttgttttataggaagacaccacacatgcagcttaggccatcaaatacgaagcctcccctgccctgccctgtgcagtttcccaccctccctgcgtctcactggtgacccactgctgtcagctctgtgtcaagagtgagagcatgtcctgtagaaatatatttatacagcattggccgggcgtggtggctcacgcctgtaatcccagcactttgggaggccgaggcggacagatcacctgaggtcaggagtttgagaccatcctggccaacatagtgaaaccctgtctctactgaaaatacaaaaatcagcaaggcttggtggtgggcacctgtaatcccagctaccacagaggctgagacaggagaattgcttgaacctgggaggcggaggttgcagtgagccaaggtcacgccactgcactccagcctgggcgacagagcaagactgtgtctcaaaaacaaaacaaaacaaaaaaaacctatacagcattataaggctggacgctgtggctcatgcctgtaataccagcgctttgggaggccaaggtgggtggatcacctgaggttgggagtttgagaccagtctgaccaacatggagaaactccatctctactaaaaacagaaaatgagtcgggcatggtggcacatgcctgtaatcccagctccttgggagactgaggcaggagaatcgcttgaacccgggaggtggaggctgcagtgagccaagatcgcaccattgcacttcagccttggaaacaagagcaaaactccaaaagaaatatatttatacagcattatggtattttaaataaaatcctcagtgattgtttcgttgtaatattttataccaaaagttgtgaaaatttgcatgttttcatgttaggaagatggattccttgctcctttacatcctcatgtgaacgttctctgaattagaaattagtcaccttggcaaggtgcagtggctcacgcctgtaatcccagcactttgggaggctgaggcaggcagatcacctgggctcaggagttcgagaccagcctgaccaacatggtgaaactctgtctctactaaaaatacaaaattagcctggtgtggtggtgcacacctgtaatcccagctacttgggaggcttaggcgggagaatcacttgaacccgggagatggagtttgcagtgagccaagattgcgccattgcactccagcctgggcgacacagcgagactgtctcaaagaaaaaaaaaaaagaaagaaatcagtcacctctctttttttttgtgcctggcgtggttcagggaccatgtgtgccattcagcccaggaggagtctctggaggtcctgagctttgtctaggatgcatcctctctggactttgcttgtcacctcctcactgaagagggtggccaggttctgctcaggagcttccctttctgcacctgctctgcagcctgtgtgaggccataggaagctggggtccgcaccgccacctagtatctgcccgtgtaactgcgggctctgatttatgctgatgcctttgttctcagtggcttcctgatctggggccctgttacttcagtgcttctgttcaaccaagacagaacgttgtccctcaggagaaatctggagtttgtggtttcctctggatgatggcgcgtcgtgcctgagcaggggctcaggctaacgtgttcatgcattttcccactgggctcccagcaggttgacttggtgcttctttggggtgcaggaacttgctaaggaccttctggatttctcacaaagccaattggtctgtgtactgtttaatttttgtctccagggggacagaaaggtctgtggcttcgcattcctgtgtcttgctgacattactcttttagtagagttgcgaatttcttacacaggtctggagtgtcttttagttaggggccatgtgtatatttgctgagggagaggtaggatgtttcttgtgtgtgtgtgtcatttataattagtgctgctgaagaaggaaacttgttttctttttttattttttttgagatggagtgtttcactcttgttgcccaggctggagtgcaatggcgtgatctcggctcactgcaacctctgtctcgcaggttcaagcaattctgctgcctcagcctcctgagtagctgggattacaggcatgtgccaccacgcctggctaattttgtatttttagtagagacgggatttctctgtgttgatcaggctggtctcgaactccccacctcaggtgatccgcccatcttggcctcccaaagtgctgtgattacatgtgtgagtcaccgcaccgggccaaaacttgctttcaatatattcgtattagttaatacgcctaaatggcattctttgttatggttacaatcctgtcattcgttagttctaacagatcctgctttttcctgcctcctacccccactttttttttcctgttttttttcctctgcttctggtccctgctcaggcatcctgtgcagtggtaattggctgcagcacagaccagtgccctgtttctggccttaaattagaggaaatgcatcccacgtttactgttgattatgatgttttatgagatgttcttgtttaatatcatgttttttttgtttgtttgttttccaatttcattcttggcctgagtattaattatctagtaatttcttaaggtatgtcctgctgagatattttctttgacctttatttgtttgtttattttttgagacggagtcttgctcttgtcgcccaggctggagtgcagtggtgcgatctcggctcactgcaacctctgcctcccaggttcaagcaattctcctgcctcagcctcccaagtagctgggattacaggcgcccgccaccatgcctggctaattttttgtatttttagtagagacagggtttcaccatgttggccaggctcgtctcaaactcctgacctcaggtgatccatccacctcggcctcccgaagtgctggagttacagacgtgagccactgcgcccagcctatttgttaaattagtgtataatattcttaaattttgtatcatgtatcactgttttattaatgaaataaatcaataaactccattgggcttttgctaatacctacatatgtaaattttaatggacaaaagtgtatttataggccagggttagtggtgcatgcctataatcccatcttcttgggaggctggggcaggattaaactcttcccatgaacccaggagtttgagatctttctgggcaacctagtaaaaccccatctgaatttttaaaaatactacatatttttgaatgtgaacatttactagagattggaattgaagtttctatgttttttaatgatctgccatttttaatagcttaatattcaaaaatgtttatcaactaaattgagtacaatttctacatttttagtgttgtaaacaatgtggtcctcattttagggacgcttgacattcatggacgtggccatcgaattctctcaggaggagtggaaatccctggaccctggacagagggctttatacagggacgtgatgttggagaactacaggaacctggtctttctgggtgaggatgacttccctccagaagccgggatctgctctaatctgtctttgcattttctcttgcgtgcctcttgggagcccctaaattgcttaactgaggtagaaaccttgttgactcagaaatgaaaagctctattatgctctctggatttgaaatgcgtcctttcttcagatgtaccgcccccttcataatacatcattgggtggcaccggataaccagttctctgttttctcccctgtgcttacaagtcagtagttcttggaagagatctcagtgtctacatattgcatattccctaagcattcagaaggagccagtctgtgggtgaacttgtgagatattattcttgatccatttgcgatatcccctctcttacctaaacacagggtttgggttttggaaatgccccagcacatcttgtttctttctttttattaacaggaatctgtcttcctgacctaagtattatttccatgttgaagcaaaggagagagcccttgattctgcaaagtcaagttaaaatagtaaaaaatacagatggaagggaatgtgtcagaagcgtgaacacaggtaagagctctgatgggcagtgtggaggccatagtttttatttttttatttttgagccagggtgttccgctatcacccaggctgtagtgcagtggcaatcatagctcactgcagcctcaaactcctggactcaagcaatcctcctgccttggcctcccaaagttgtagattatagccactgcaccttgcaaagccatactattttttttttttttttttttttttgtctcactccgttgcccaggctggagtgcagtggtgtgatctcggctcactgcaacttctgcctcccaggttcaagtgattctcgtgcctcagcctccccagtagctgagattacaggcatgtgtcaccacacccagctaatttttgtgtttttagtagagacggaatttcaccatgttggacaggtgggtctcaaactcctgacctcaagtgatctgcctgcctcagcctcccaaagtcctgggattacagacgtgagccaccacacccagcccatactaactattcaagagtgtgtgggaaactctccaaaggtgggagagttctgtgagaaaagaaaagtttaaatcctaggcattctgaatggaaatatttctttgctctctcttgtcactcagttctataaatgtgtgatagtttcatcttttcaccctcgagtggtgttgccacccagagacaaaagcaaagtctttatcctgatggacagcaccctgtcatgtggcttctgtgaacttttgttccatgattctgaagaacacagggagcattgttgccaggggtctctttcccctgtggtctttcttcctgtacttgattccatctgatgcttagtttctgtccctgtaggtcaaagctgaggtcttcatagacctgcccccttgacctattcatggtccaccccatttcctgtaatgggaagatgtaatcaggaaatgagagaacatgagctactcttttttgcatctgggccctggaaactacaggtgcctccagccccctctgcctgttcaggtctatttggatgggaagaagccagtgattttcctattctcacatgccactcagcacagagcatttcacttctggtcaccaaaatgtgtggggatttctccccatcggcaatttttcactggatctttactgggttttctataattcatttctaacactgtctacctggagttagaatcagatcccacaggctaagggttgggttcccaagcctgtcgcccacctcagccaccacttgttagtagtagattgtcacctttctgtctgaccaacacagctgtaagctgggttccctcgactcccttcttgggttgattactttgctcgggtggctcacagaactcagtgagacacttcattaggttcactggttcatgatgcaggatgtttctaaggatacagatggacagccagatgaggagattcacagggcgaggcacgtgggaagattgactgggtgtgccgccctccaggcgcctgtgtgtcttcagcatttggaacctcttgtgaccccatagttcacgagcggcttcatcacgtaggcgtgattgatattaactcaatctccagcccctctcctagaagctagtgggtggggctgacagtttcatgcttctaagtatggcctggtctttctggtaatcagccccatccaaggaacccacaaaggttgcctcattagagcagatcacactcgtaccacccaggacatctcaaggtcttcagagctctgtgtcaggaaccggggaagagaccaatgtatgtatgtattcttattccacaaggcccctcagccattcttcagttgtgcttcatccacactttactggtgtgtgtcacaggggagtaggtggctcttctgagatgcttactcagctgagtggggcagatagtcaacagaaagaccctgtattcgatccctaggtccccatggggaacatggcacaaaatagcaaccagatgcttctggttttaacactaccatcatttgttcaaaccactgttactttcatcttgtacctttccatgtattataaattaacttggtttttgtatatttagtcagcagttccatatttcatataatactctttgtgtttattattttgtatctgtagggctgtagtatcagggaatggccattgatttatatatttttgagtgtggtttttttaaatgcacagggtatgcctcagcaggagagtctctaaaactgacactccagaaatttttgaataggagtttaaatatttgttttcctttgttgtacgtgacttagtagctactattgaacaacacttttgccaattaaatgtattacagtgtataatatggaaattttttatatcttaagaatatgctgttttaaaattgttgccatcttaatctcagaaataccattacactgacttgccgtaatttgttatttaagactgaggggcaaaactcaaaccgtatcttcctctgtctggtcttgcaccacgcaacaataaacacagacaacttatgtcaccaaatgtgagttttacttccaccaataagcaatcagttctgcagtggctacttgctgggggcccttgaattctattctgatgctgtgtacctggagagcgtgtcacatgccacaggttgagggctcagtctccaatactgccccctttcagacacgggtcataagtccaggcctctggaactttcgaccaactggcttcaaaagttggggttcccatggctccctctttgggtttgattaatttgctagagtggttcacagatctcatggtaatacatacttaacatttacagggtttattccacagcgtattttaaaggctccaggcccggcatggtacctcatatctgtaacccaagaatttttggaggctgaggtgggcgcattacttgatcccaggagtttgagaccagcaacataatgagacgttatctctacaaaaaattaaaaaattggccgggcgcagtggctcacgcctgtaatcccagcactttgggaggcccaggcgggcggatcacgaggtcaggagatcgagatcatcctggctaacatggtgaaaccccgtctttactaaaaatacaaaaaattagccgggtgtggttgcagacgcctgtagtcccagctacttgggaggctgagcccggagaatggcctgaacccgggaggcggagcttgcagtgagcggagatggtgccactgcactccagcctgggagatagagcgagcctccatctcaaaaaaaaaaaaaaaaaaaaaaaaaaatttaaaaaattagccaggcatggtagtacacaccttgtagtcccagctactcaagaggactgctcgagcccaggagtttaaggctgcagtgagctatgatcgcgccactgcactgcagcctggctgacacagagcaagaccttattccaaatagatagagaaggataaattaacagatggaaagaacatagggtcaggtctggaagggtccccagcacaggagcttctgtgtcctggagttggcttgtgccaccctcctggcatgtgtgtgagttcctgctcaccttcctgtcagcctcggggtgttcagctgtccagaagctctctgaacccagtccttttgggtttttatagaagctttattatataatgaagttacatgatataacttcattatttgtctttttgtctttgtatgactggcttatttcacttaccagagtgtctttcaggttcatccattttgtagcatataaagaaatttccatatttttttaggaacaaagaatgcttcttttgctttctttttttgagacggagtcccactctgtcgccgggctggagtgcggtggcgcgatcttggctcactgcaacctctgcctcccgggttcaagcgattctcctgcctcagcctcctgagtagctacaactacaggcatgcgccaccatgcccagctaatttttgtgtttttagtagagatgaggttttaccatgttcaccaggatggtctcgatctcctgacctcgtgatccacccacctcagcctccaaaagtgctgggattataggcgtaagccactgcgcctggcctcctttttctatttgttaatcaggttactggttttctgatttgtaggagttttatgtattttagatatataaaatcttatcagaggtatgatttgaaaatattttctcacatatggtaggtttccttttcactctggtaattgttttcttccatccacagtagttgtaggtcttgtggtagtacattttatgtatttttaccttctttcttgtgttatcagtgttctatccagggaagcattattgaatccaacgttatgaagctttccacctgattttttctaggagttttatggttttaggtcttagttttaggtcatgaattggctttcagataatttttgcatacggtgtaataagagttcaacttcattcctttcttgtggatatccagtttcctcagcactatttgataaagagactgtcctctctcgttacatggtcttggcagccttattgaacatcatttgaccaaatatttgagggtttgtttctggcctgtctgttctagtccattggcttatatgtctgccttcatggcagtacagttctattttgatgaaggtagcttagtaataagttttgtaatcatgcagtgtaacacctccagctttctttctttcaagtttgttttgctattgaggcacatgtgtgatttcatattaattttaggatgagtttatttatgaagaaaacttccttgggattttgctaaagagttcactgaatctgtagatctctttggctattgacatcttaaccttaagacttacaatccataaacatgggctgtttttgcatttgtgtgtgtcttctctactttgtttcagcaattttttgtagatttctgtgtacaaatttttcccgtccttgttaagcttattccctccatatttggaggttttgcatctacagattccacaaaattgcagatcagaaatccacaggtcattgaatctgcacatatggatcccatggatacgtagggcagactgtattttcaatccatggttagttgaatctgcagatatagaaaccacaggtatggaaggcctgcagtaaggaactcaggcatccacagattttgatatctgagagtgttttaagaaaaactctcaaaccatgtttttcctctgctctcacgccaccacaacaatctgtcaagacagaataagacttccgtgaccgacggtataggagttttttcccacacatcaagcaacggacaagagctgggtttcctacagttcagttctgacactatacctggagatagtgtcagatcccacgggttgagggctcagtgtcaaaggcttcccccatttcccaccagttacgagtctgggcctctagaacttctgaccaactagcttccatttgtggtttctgtggcccctctttgggctcgataaagtttctggattgtctcacagaactcacagaaacacttacttacatttgccagtttattataaaggctattgaaaaggatacagatgaagagacctgtagggcaaggtatgggggaaggggtgtggagcttctctgccctccctgcgaccagcatccaggaagctccatgtgttcagccatctggaagctctctaaatgcagtcctcttagatttttatagaaaccttattatgtcagcattctttcccccagacataaagcaggaccctctctcgggaggtcttaagacctataatcagaaagatgggagattagagttctgccttgaggcaggtgaatggagggcaggaaaaggttggagaggttctgtttcctgagttctgccctggggcctaccgtacccaacactataacagaagactgtagcaaaggctatgggagttatgagccaggaactgcagatgaaaacaaatatatatgtaataccataacaccacacaggggttcctggaaccagtcttccctggacaccaagggacagctatattctcaatagaaataatgcaacatgggctttctttttattttttcctaattatgaaggaaaagccttcattatttcaacactgagtatgatgttaccttttggctttttatataaggcttctgtatgtaaagtagattcctcgtattcctaatgtgtagagtgtttctatcatcagtagttgttgatgtttttcaaatgttttttctgcatctgatgagcctatcaagtgggtttttgtttttattctgtttttgtggagtattgcagggatcaatgttcctaagttgcaacatcgttgcattccaggagtgactttcacatgatcatagtgtgtggtccattttaatatactgctgaacttgcttgctagcattttgttgtggatatttgcattagattgatgaggaatattgctctgtagttttcttagagcctttgtgtgccttttctgtcaaggtgacactagccttattgaatgagagagggagtgttttgtccatcacatggaacatttttaagagtgttggtgttaaatcctttttcagtatttgatagcgttttacagtgaagtcatctggttcattacttgtttttgttagtagttatttgataactaattcaatctccttatttgttactcgtcttagtgtttctacttcttcatgagtaagtcttggtgagcagtgtgtatctagaaattcatccattgttgggacacagttgtacaatctcattttcttttttttttttttccgagacagagtctcgctcttgttgcccaggctggagtgcactggcgcgatctcggctcactgcaacctccgcctcccaggttccagtgattctcctgcctcagcctcctgagtagctgggattacaggcgtgcaccaccaggcctggctaattttttgtatttttagtagagatggggtttcaccatggccaagctggtcttgaactcctgacctcaggagatccacccgcctcggcctcccaaattgctgggattacaggcgtgagccactgcgcccggccacaatctcattttctacaattcagttttatttgtaatgtcctctattccatttctaagtttacttatttgaggcttacgcttcatttttgttttgttgtttatctagctaagggtttgtcaatctttttaaaatttattttaatttaaaaattttttttttcaaaagagacagaggtctcattatgttgctcaggctgatctcgaactcctgagctcaagtgatcctcccgccttgccctcccaaagtgctaggattacaggcgtgaaacactatgcccaactgtcaattttcttaccattcgaagtatgagcttgcagtttcatgactttagtgcttctctcttctgttttctaatcttaattttttctttctgctacctttctatttagtttggttttttttatacttcattgaagtataaagttagattgtttacatgtaactttatttatttattttagtgatgaggtctcactctgtctcccacattggagtgcagtagtgcaatcatagctcaattcaaccacaaactccgaggctaaggtgattctcttatctcagcctcctgagtagctaggactacaggtgcatggcactgtgccttgctaactaaaaaataaataagccagcactatggctcacgcctgtgggaatcacactatgggattacgcctgtaatcccagcacttcgggaggccgaggcgggtggatcacctgaggtcaggagttcaagaccagtctgaccaacatggtaaaaccccgtctctactaaaaatacgaaagttagctgggcatggtggcacacgcctgtagtcccagccactggggcggctgaggcaggagaatcagttgaacctgggaggcggaggttgcagtgagccgagatcgcaccactgcactccagcctggtgacagagcgagactccatctcaaaaataaataaatacataaattttgtagagatggtgtcttgtattgttgcctgtgctggtctgcaactcctggcttgaagtactcctcatgcctcaaactcccaagtgccgggattatagatgtgaggcatcatgcctggccatttgtttatttttaatgtaagcacacatttttgttgcattttataagttctggtgtgttctgttttcctttccttttctatcaagatattttaaaaatcagtttgtggtttcttttttgacctattggttttttagatgtgttgtttcatttggacatatctgtgggttttacatttctttctgttaattttgttttattacattataatgggaatcaatactttgtagacttctaaatgtttaaaagattgttttgtgtcataacatgaagtccatcctggaaactgttccatgggcacttccgaaaaatttgtattctgctgtttttaggtgatgtgttgtgtatacgtctgtcatatctaatgaggctatagtgatgtttgagtcctgttttcttcttcttctctttgatttttatttatttatttttattttttagttttaaggagcagggagtttaataggcaagaaagaagggggaagaaagaaagaagaagctcccctgtacagagacagagtgaggggggctccaaagccgagagacagaacccccttctctttggttctatccccttttttttttttttttgagacatagtctcaccctgttgcctacccaggctggagggcaatggtgtgatctcagctcactgcaacctccacctcccaggttcaagcgattcttatgcctcagccacctgagtagctaggattactagaatgcaccactgcatccagctaatttttgtagttttagtagagatgggggtttcgccatgttggccaggctggtatcaaactcctggcctcaagtgatcctcctgcctcagcctcccaaagtgctgggattacaggtgtgagccaccctgcctggtcaccttgttctatccatttttgaaaatgaagtattgaagtctactactatatcgtggagctatctgtttctcctttgaattttgtgaatgtttccatcctatacttaggggctgtgatatttggtgcctatatatttatagttgttatatcttcttggtgaattgaacccttcatcattgtataataacttttctttcttatactggttattgagtaaacgtctgttctctttgattttaatatagacacctctgtgctctgctggttactatttgcatggaatatccttttccatcctttcagtttcagccaatttatgtctttagagttaaagggagtctgtcgtggataggatttagttggatcctgttttgttctgattccaatgggaaatcatttgtatttcacatactcatagagaaggccttaatagtgccatcttgtcacatattagctgtagattttgtaacatcttgtagatttttttgtccttcatttttcccttactgcctgcttttgtattttgttggttttttaattgtgacatgctttgatccccttctcatctcctctggtgtatgtttgtagattttcctcttgtggttaagattgaagttacataaaacattgtaacaataaaacattattttaaaatgtcaacagcttaaccttgattaggtaccgaaagcattacattatagctgtgctatttgttattgtgctagaagttccttctatatatgtaatattcccattaacacattttagtgctttttaaataattttgcctttgaaatgctaggaaagaaaagccaaattacaaatgaaaagtacaataatgcatgatttttttgttttcttttttaatttttttctcatacagtgtcactctcaggatactatgtttccatatttgatcatttattgacctttaatggagaactttatattttcatttgggttagaagtactgtctggggtccttttatttccttttgaaggattccctttaacatttcttgtcagacagttccaaggtactaattaccttcctcagctcttctttattcaggaacgtgtaaatttctcctttatttttgcaagcaagttttgctgaatatagtattcttggttttttgtttgtttgtttgagaaggagtctcgctctgtcgcccaggctagagtgctgtggcgcgatcttggctcactgcaacctccatgccccgccttcccccatgtgaggttcaagtgattctcctgcctcagccttccaagtagctgggattacaggcatgtgccagcacagccagctaatttttgtgtttttagcagagatgaggtttcaccatgttggccaggctggtcttgaacttctgacctcaggtcatcaatccacctcagcctcccaaagtggtaggattacaggtatgagccactgcacccagccgtatttttttttctttaagcactttcaacatatcatcatcttactgccttctagcctgcaagtttgctttaagatgtttaatgataggctgggcacggtggctcacgcctgtaatctcaacactttgggagaccaaggcaggcagattgcctgaggttgggagtttgagaccagtctggccaacgtggtgaaaccccgtctctactaaaaatacaaaaaaattagacgaacgtggtggcgtgcgcctgtagttccagctacttgggaggctgatgcaggggaattgcttgcggaggttgcagtgagctgaggtggtgccactgcactccagcctggggcaacagagagagactccgtctcaaaaaaaaaaaaaaaagaattgtgacaggtgtgacagggagacctttcccaattagcctgttgtaaagggtgtgggaacacctcactcctgggattgtgtctctcctagctttatgcgtatattatactattactaatgtctatacaactgctcttaaatgtcttattttctctaagaggctcatccctgctttttctgagaagctttcagtttctgttctatttttctgcccttaatctttctcaaagtcactcataatcctcccgagtcctgcagattccccactgctccaatgcatcacgtcacccccttgtgttttcagctctcacaatgtgacatgcaaagtatgccgatacttcttccagtgtctgagttgggtgaggctgattctggtccctccaccagacggtaaacatgccagaatcatgggttcatgttctactctttcttcttttctagggaggagctgtgtattgggaagcaatgcagaaaacaagcctattaaaaatcaacttggattaacccttgaggcacatctgtctgaattgcagctgtttcaagccggaaggaaaatttacagaagtaatcaagttgaaaagtttacaaaccatcgttcctcagtttcaccacttcaaaaaatttcttctagtttcacaacacacatttttaataaatatagaaatgatcttattgatttcccattactcccacaagaagagaaagcatacattagaggaaaatcttatgaatatgaatgtagtgaagatggtgaagtttttagagtccgtgcaagccttactaaccatcaagtaatccatactgcagagaaaccttacaaatgtactgaatgtggcaaggtcttcagtcgcaattcacaccttgtagaacattggagaattcatactggacagaagccttacaaatgtagtgaatgtgacaaggtgtttaatcgcaattcaaaccttgcacgacatcaaagaattcatactggagagaagcctcacaaatgtaacgaatgtggcaaagcttttagagagtgttcgggacttactacccatcttgtaatccatactggagagaaaccttacaaatgtaatgagtgtggcaagaacttcaggcacaaattttctctaaccaatcatcagagaagtcacacggcggaaaaaccttacaaatgtaatgaatgtggcaaggtctttagtctgctttcataccttgcacggcatcaaataattcatagtacagagaagccctacaaatgtaacgaatgtggaagagcatttcacaagcgtccgggccttatggcccatcttctaatccatactggagagaaaccttacaaatgtaatgaatgtgacaaagtctttgggcgcaaattatacctaaccaaccatcagagaattcatactggagagagaccttacaagtgtaatgcatgtggcaaggtcttcaatcaaaatccacacctttcacgacatcggaaaattcatgctggagagaattcactgcgtaccttacagatggaatgaatgtggcaaaatctttagttagaattcacacctagcacaacattggaggactcaggagaaaaaccttacaaatatcataaatgtggcaaagaatttagtttgcattgaagcctcatcactcatctcttgatccacactgaaaggaaaccctacaaatgtaaagttaataacatatataaataatctataaagagagaacagttatatcagaatagagcatttaatgaaaactaccagtatagcatattcttgagtaggattcacatttaactgctggcaccgtaatttgtaactctttgatttagaatgtacatacttctcatgttttaagtaataaagtttaaagtttttttttagttttttcttttttttttgagacgaagtctcgctgtattacccaggctggagtgcagtggcatgatcttggctcactgcaacctccgtctcccggattcaagcaattctcctgcctcagcctcctgagtagctgggattacaggcatgtgccactactgcccggctaatttttgtatttttagtcgagacggggtttccctccgttggccaggccggtttcaaactcctgacctcaagtgatccactggccttggcctcccaaagtgctgggattataggtgtgagccacagcgcccggcctagtttaaatttttcttagtgtgaatgaattacatcctttctaccagcgttgtttaatcttacctcaggaggatactttatagtagagaataataacccattatgattttaaggttgaagcagccagaaaagtgtgtgtgtgtgtatgtgtgtgagacataaaacaacatacgcttctgggtgcaatatacttaagtaagtatgatgttgagtaattacacttagtacttgagttagtttctctgtactctggtgtaggatgtttatgtgggtaaagtcaaaatcactttaatagtacaatttcagccttgtacaccctcaaatgtgtgtgagtgttaaagagtatgccctgtattgtgtttctacatgcctctttcttgtgtgccaaataagaactatggtgtgcaccttcattttcatgcagcaaaaatatatagtaatatgacaaatattaggaaataaagtatgggttgagggcaaaaatactgtaacatggccgggcctggtggctcacgcctgtaatctcagcactttgggaggctgcattgggtggatcacgaggtcaggagattgaggccatcctggtcaacatggtgaaaccttgtctctactaaaaatacaaaaaaaaaaaattagctgggcctggtggtgtgcacctgtaatcccagctacttgggaggctgaggcaggagaatcgcttgaacccaagaggcagaggttgcagtgagctgagatcaccccactgcactccagcctggtgacagagcaaggctccgtctcaaaaaaaaaaaaataataataatactgtaacacaatttctttttgtacttctagtgttcagtgacatcatttgaaaatattaatgttcacccatcttctttttaagtcacacacagaaagggaattttgttttggtacattaactagaaacttcatatagtcaccctcacaactcttttggtaatttgaatttttgaccactcttctggaacttgtttgaagtccccctaaggtttggcttggatcttgagaatgatgatcccatacactgatatggtttgagagtgtttattatataatgaggctctgtgggggaaagcagggtatacttttccagctggtccaaaagtggcttcagagaactgggataggtgactggcttggggtgtcatgattgctaaagggtagggctggggcggggatacccactacccatactggaaacttagttacaattcacacctagcatgtatatttttatattttttgtatgtatatatatttttacatttttttcctacattgcctccaaattctatgtttaatacatttcttccctgttttgctctggtgaaaactttaggggacaaataaatgagtgctgtttggagacaaaattttgtgacatgggactgggcattgtggcgtgtgcctgtagtcccagctacttgggaggctgagatgggaggatcacttgatgccaggaggtcgaggctgcagtcagtgagctgtctgcacttcagcctgaaagacagagggagaccatctcaaaaaaaaaaaaaaaaaaaaaaaaaaagttgtgacctgagtatgtccataagacaatggcaggtatacactaggattaatataaatatgaaaaaaaaaaaaaaacttggccgggtgcggtggctcacgcctgtaatcccaacattttgggaggccaaggcaggcggatcacgaggtcaggagttcaagaccagcctggccaacatggagaaaccctgtctctattaaaagtacaaaaaagtagcccggtgtggtggtgggcgcctgtaatcccagctactcgggagactgaggcaggagaatcgcttgaacccaggcggcggaggttgcagtgagccgagatcgcgccacttcactccagcctgggcaaaagaacgaaactctgtctccaaaaaaaaaaaaaaaaaaaaaaggaaattgcacattccgccctggcagggttttgcatttcatattttaatttgcatccccttcataaacaattcaaggactttaaaattccggaaactagtgtttattattcatttatatttatttattttaattatttatttccaatttgttatttatgattatgtatttattaggcgcaaggtttctctctcatgcccaggcgggagtgcagcgcacgacctcggctcactgcagcctccacctcatgggctcaagcgatcctcccacctcagcatccgggtagctaggaccacatgcgagcgcccctacagccgatttaaaattaattttaatagcaggaattttcctggatctaatcatcaacaaactttccctctgccgggacacaatctatttccagatagctgagttcttccagtctccacggcaggtctagcctccaaaacgagacgagctgggagcgaggcggagggaagcgcaggctccgcccaatcccacccgggcctggcctcgcctcgcctctcagctgcgcgcgcagtttcctggagacccggaagcagattacgtggagtgacggtcatgctgcggcgtgtgagtttccctttgtttagattaaatctgggatgctgagtcccctcgcgcttctgtacccggcatctcaggggtcacacagaccttgaaatccccgcatcgctccctccaccccgactaaactcagacgttctaatgagagtctggcggtcgcttccctgagtgttaaaatcgctcggaggctggtcctgtccccggtctttcaccacagggccatgtagacagctcctgtcgcggagtttgcctgcttcaaatccttcagtgacccctagacacggcccgcgctgcgtaaagttctcacccgcgagatggatccacgtctttccggtcccccaagcctcgccctcttttcacaggcctgcccccttttctgtgccttaaatgagaggaaatcgatctgatgtttactgctgattgtgatgtttcagcctccattgggcttttgctaacacctaaataaatatttagtggacaaaattaggttagtgcaaaagtaatggcaaaccgcgatcacttttgcaccaacctaatatttatgggccggggctggaattccatcttctccggaggcccaggctggagaattccttgagcacaggagtttgagaccactctggacaacatagtgagacccccatctcaatttttgaaacatatgtttcagtacgggtatttaatagagattggaattctcgtttctatgtttttacatggtctgactttttgaaatagtttgaaataatgtttataaactgaattgagcacagtttatacatttttattgttgcaaacatgctgaaatgcacatttgcaaaaacaacgacagccaggcacagtggtgcacgcttgtcattcgagttactcggagagggtgtcatttgaggccaggaattcaaggctgtagtgtgccatgaataagccactgcactgcaacctggacacattaaaaaacgaacaaagacaaatatctaaaaaagaggttattgacagacaactctttcagttgtcacatatatgtttactagagtatatgtgtgtgaatgtatatatgtatatgaataagtgtgtacatgtgatgtgtgtggatgagtgcacagatgagcaagtctattgtttttatcaaaggcgcatcatcagtttatatacgtcttatatcttttaacagttgaaattacatcttatatattttcatgaccttaaaattgttctacactgttatgatagtgagtctatggctgtaaggatagtaacctgttatggggatacatgtgcgacagtttcttgattttaatcccggaacttattttaactatactcagttaggtcattgtctgtcaatttacttttgatgctgatctgttattgtttgatgtttttttttttctttttctgagatggagtctctctttgtcacccaggctggagtctcgctttgtcacccaggctggagtgcagtggcaccatctcaggtcactgcaaactctgcctcccgggttcaagtgattgtcctgcctcggcctcccaagtagctgggattacaggtgcccaccagtacgcctggctaatttttttattttcggtagagatggggtttcaccatgtttgctaggctggtcttcaactcctgacctcaaatgatccacctgccttggcctcccaaagtgctgggattgcaggcatgagccaccacgcctggcctaattcttaaagtttgattctaatgcccagactcctgggatctggcgcttactctgccatttttagccttcacacctggggcaagtttcttagaatgtctgagaaagagttgtctcttcaataggatgggaacagattgttcttttatgggcttttgttgttatagccgttagtacatgtacaacatttagaaagtgcctgtcacatgggaggtgttcaaaagcttcatcctggctgggtgaggtagcttacgcctgtaatcccagcactttgggaggccgaggcgggaggattgctgaggtcaggagttcaagaccagcctgaccaacatagtgaaaacctgtctctactaaaaatagaaaaattagctgggcacagtggtgggtgcctgtagtcccagctactcgggaggctgaggcagaagaatcacttgaacctgggaggcggatgttgcagtgagccaagattgtgccactgcactccagcctgggcaataaagtgagactccatctaaaaaaaaattatatatattgtatctgacgcttctatagaaataactgtgggttaattttttgtatttcttatgttgtccacaaaattagaaatctctactaattttttttttttttggagacagagtctcgctcagttgcccaggctggagtgcagtggcaccatctcggctcactgcaagctccgcctcccaggttcacgccattctcctgcctcagcctcacgagtaactgggactacaggcgcccgccactacgcctggctaatttttttgtatttttagtagagacagggcttcaccatgttagccaggatggtctcgatctcgtgacctcatgatccacccgccttggcctcccaaagtgctgggattacaggtgtgagccaccgcgcccggcctagaaatctatactaatttaaagaatatcaggttgggcatgcagtggctcatgcctgtaatcccagcactttgggaggccgaggtgggcggatcacgaagtcaggagatcgagaccatcctgtgtaacatggtgaaaccgcatctctactaacaatacaaaaaaaaaaaaaaattagctgggcgtggtggcgggcgcctgtagtcccagctactcgggaggctgaggcaggagaatggcgtgaacctgggaggcggaggttgcagtgagccaggatcgcgccactgcactccagcttgggcgacagagcgagactccgtctcaaaaaaaaaaaaaaaaaaaaaaaaagaatgtcataacttctaatggagaagtatattaaaacacaattagaaacatataactagctaaaaaaataccttaacgtggatttgtcagaacatccacttcaatcaagtcagtccttacaactgtctcctcattttgtgtgatatcctgttggtgaaatgtgtttttcattttagggacacttggcattcagggacgtggccatagaattccctcaggaggagtggaaatgtctggaccctgctcagaggactttatacagggaagtgatggtggagaactacaggaacctggtctttctgggtgaggataatgtcccttcagaagtcaagatctgccctggtgtatttttgcattttgtcgtgtgcctcttagcatcttaggagtcactgtattgcttgactgagattgaaaccctgttgactcagaaatgaaaacctccataatgctttataatgctgtatttttcagaaacaataagctccataatactttctggacttaaaataattgctttcttcagaattctggcccctttgagattcatcattgagtggtaccagggcttaagtatgcgtcaaaccttatgacagacttaagatatacagttctgtgttatccacccctgtgcttattatttattagttcttgtaagagagcttgatgtctgcatgttacaatgttccctcagcattcagaaggaggcagtggatgaattcatgtgaaatactgtaatttttttttttttttttttttttgagacagagtctccctgtgttgccaggctggagtgcagtggcaggatctcagctcaatgcaacctccgcctcccgttttcaagcaattctgcctcagcctcccgagtagctgggactacaggcacgtgccaccacgcctggctaatttttgtatttttagtggagatggggtttcaccatattggtcaggctagtcttgaactcctgacctcgtgatccgcccacctcggcctcccaaagtgctgagattataggcgtgagccaccgtgcctggcgaaatactattcttgattcatttataatatcctctctcctacctagacatggggcttgcattttggagatgccacagtacacatttattctttctttttattattattatttttttgagacagagtctcgctctgtcgcccaggctggagtgcagtggcgcgatcttggctcactgcaagcttcgcctcccaggttcacgctgagtatctgggactacaggcacccgccaccacgccccgctaattttttttttttttgtattttttagtagagatggggtttcaccgtgttagccaggatagtcttgatattctttctttttttaaataggaatctgtcttcctgacctgagtgttatctccatgttggagcaaaggagagatccccggaatctgcagagtgaagtgaaaatagcaaacaatccaggtggcagggagtgcatcaaaggtgtgaacgcaggtaagagcttggatggccagagtggaggccccataattttttttttttttaaacagggtcttgctctgtcacccaggctgtcgtagagtggcaatcatcagtggcaatcgtggcttaactcatagcctcaaactcctggtctcaagtgatcctccttcctctgcttccgaaagtggtgggattacaagcatgagccactgtaccctgcaaaaccacactttgagtttctgtttgggagctctctgcaagtgagagaattctttgggaaaataaaagtttaaatcctgtgagttctgattgaagtttgttttgtcttgttttgttgagacaagttcttgctctgttgcccaggctggagtgtagtggtggtgtgatcgtagcccgtgtaccctcagtctttgggctcatatgatcatctcacctctgcctgccaagtcactgggactgtaggcatgtgccattgcatcttgctaatttttaaaaaatcttttgtggagatgaggtctcactaggttgcacaggcttgtcttgaactcctggcctcaactattcttcccacctggcctgccaacgtgcttggattgcaggcatgacccaccatgcctggcctagaagggaaatttttctttgccccctcttactgctgctgtgttctttgtttttggcgttttgtttgtttgcttgtttgtttttgagatggagtctcactgtgttacccaaactagtattggttttttttttttaatttttaatttatttttattaatttatttttttgagacagagtcttgctctgtcgcccaggctggagggcagtggcacgatcctggcttactgcaacctctgcctctcaatttcaagccattctcatgcttcaggctcccaagtagctgggattacaggcgtgcaccaccaagcctggctaattttttttttgtatttttagtggaaacggggtttcaccatgttgaccaagctggtctcgaactcctggcctcaagtgatccacccaccttggcctcccaaagtgctgggattacaaacatgagccactgctcccgggcataatgttattattataattatttcaatagggttttggggaacaagtggcatttggttacgtagataagttctttagtggtggtttctgagattttggtgcacccatcacccgagcattgtacgctacattcaatatatagtcttttatccctcacccccctcccaccttttcccccaagaccccaaagtccattgtatcgcctttgcatcctcccagtttaactcccacttatgagtgagaacatacaatgtttggttttccctcaggctttgggctcatatgatcatcttgctctgcctgccaagtcactgggactgtaggcatgtgccattgcatcttgctaatttttaaaaaatgttctgtggagatgaggtctcactaggttgcccaggcttgtcttgaactcctggcctcaactattcttcccacctggcctgcctaagtgagttagttcatttagaataatggccttcaattctatccaggttgctgcaaatgccattatttcgttccattttatggctgaatagcattccatattagtatgccacattttctttatccatttgttgattgatgggcatttgagctggttctctatttttgcatttgtgaattgtgctgctataaacgtgtgtggaagtgtctcttttgtataatgacttcttttcctctgggtagatacccaggagtggttttgctggatcaaatggtagatctacttttagtcctttaaggaatctccccgctgttctccatagtggttgtactagtttccattcccaccagcagtgtaaagtggtccctttcaccacatccacaccaacatgtagtatgttttgattttttgattatggccattcttgcaggagtaagagggtattatattatagttttaatttgcatttctctgataattagtgatgtggagtctttcttcatatgtttgttggccatttctgtattttcttttgacaattgtctattcatgtccttagcaccgcccccccccccccttttttttttttttttttgagacagcgtcttgctctgtcgcccaggctggagtgcaatggcatgatctcggccccctgcaacctccacctcccgagttcaagcaattctcctgcctcagcctcctgagtagctgggattacaggtacccactgccaagcccagctaatttttgtatttttagtagagacggggtttcattatgttggccaggatggtctcaaactattcacctcaggtgatccacccgccttgggctcccaaaatgctgggattataggggtgagagactgtgcccggcccttagcccactttttgataggattgtttgtttttttcttgctgatttgtttgagttccttgtagattctggatattagtcctttgtcagatacatagtttgcaaagattttctcccatgctgtgggttgtctgtttactctgccgattatttcttttgctgtgtcataggcaaagtctttatcatgatggacaacaccctgtcatatggcttatgagaattctttgattccatcattctgaaggacatagggagggctgtgtcaaaggggtctctttttcccatggtctctgtttctgtagtgattttatctgatgctaagtttatacatcaaacctggggtctgcatagacctgcctccttgacctgtgtatggtccacacaatttcctatatgaggaagacctcatcagaagataggaaaacattggctgctcttttttttttgcatgtggggctcaaagattgcatgaaggcgtctcaacccctctttgcctcttgaggtcttgtggagatagggaaaatccagtgttttttctactctcaaatgccactcagcagagagcgcttcacttctggtcaaccgaatgggtggggatttctacgcaccaacaaccagtttttcagtggccatctaatagttttctatgatgcctttctgatattatgtatctggaattagagtcagatcccacaggcaaagggctgagttcccaaacacgtcccctacctcagcaaccaatcacaagtagcaggttgtcacctttccttcttaccaaccagctacaggttggggttccctcaagccccttcttggggttgattactttgctagggtggcccacagaactcagtaaaacactttcttaggttcactgcctcacgctgaaggatgttttgaaggatacagatgaagagccggatgaggagattcacagggggaggcacgtgggaagattcactgggtgtgccaccctccaggcacctgtgtgtcttcagcatttggaagatctcgtgaccccatagttcagggattattttttattttttattttttttagacagagtcttgctctgtcacaggctgtagtgaagtggcacaatctcagctcactgcaatctccgcctcctggttcaagtgattcttctagttcagggattttttatggaggcttcatcacataggtgtgattgatattatctcagtctccagcccctcttcccttcctggaggatagtggatagggctgacactttcatgcttgtaatcatggcctggtctttctgatgatcagcccagtccagggaacctacagaggttgcctcattagaacaaatcacattcctatcacccagaacattccaaggagttaggagctctgtgtcaggagccaacgaagagaccaatgtatgcatttcttattttacaaggttcctcagccattcttcagttgtgctttgtccatactttagtggtgtgtgtaacgggagtaggtggctcttctgagatttttactcagcagaatgggaaagacagttgacagaaggatcctttaggccggggcggtgtctcacgcctgtaatcccagcactttgggaggctagggcaggcggatcagaaagtcaggggatcgaaaccatcctggccaacatggtgaaaccccgtctctactaagaatataaaaaaaaattagctgggtgtggtggtgcatgcctgtagtcccagctactcgggaggctgaggcaggagaatcgcttcaacccgggaggtggaggttgcagtgagccaagatcgtgccactgcactctggcctggtgacagagcgggactctgtctcaaaaaaaaaaaaaaaaaaaaagaaagatcctttattggatgcccgagtcctcgtgacagaatagctcactagaatgatacatctggttataagactaaagccactgctgattttattttgggcctttccatgtattagaaatgaacttggggccaggcacagtggctcacacttgtaatcctagcactttgggaggctgaggttagtggattgattgagcccaggagtttgagaccagcctggacaacatggcaagaacttgtctctacaaaacatataaaaatttggctgtggtggtgcacacctgtagtcctagctactcaggaggctgaggtgggagaatcacctgagcccaggaggtcaaggcagcagccagccatgatggcgtcactgaactccagccttagtacagagtgataccctgtctcagaaaaaaaaataagaagaaaataaaaaataaatgaacttatttgtatttagtcaacagttccatatggtactctttgtcttctttgttttatatgtgtggggatgttgtatcagggaatggccattgatttatatatttttgaggacctttattttattttattttttgcctaggagtttatgtaacacttatatacactccaggagttttggaatgggtagtataaatatttcttttcctttcctttacctgattaagatattaaataatatttttgtcagttacgtttattagaatgtataaattgggaatttattttcatttttctttttttttttttgatagagtctcgctctgtcacccaggctggagtgcaatgccgcgatctcggctcactgcaaccttcgcttcctggattcaagcaattcttctgcatcggcctccccaagtgctaggattacaggcgtgagcctccgcgcctggcctcatttttaatttttttagagacagggtttcactctgctgcccaggctagatggcagtggtgcagttttaggtcgctgcatccttgactttgagggcagaactgctcttcccagctcaggtgatccacccgcctcagcctcccaaagttctgggattacaggcatgagtcactgtacccggctctgatatttttaataatgcttcaatgaacatgggtttctaaatatctctttaagctgctatcttagttcttttgtatatatacccagatgaggaattgttgcctatactggtaatttgattttggattatttgagaaaatgtcatacttatttttttttttattattattttcgagacagggtttcactctgtcacccaggatagagtgtggtatacaatctcagttcactgcaacctccgtctcccaggttcaagtgattcttgtacctcagcctcccaagtagctgggattacaggcgtgtgcctccatacccatctaatttttgtacttctttaatagagacaggtttttaccatgttggccaggctggtctccaactcctggtctcaggtgatctacccgcttcagcctcccaaagtgctgggattacaggcgtgagccaccgtacctggcccatacttctttgcaccattatacatttccagcaacagaacataagtctcccatttctgcacatttttgccacttgtgatgtactgttttttttgtcttttgggttttttttttaacaataaatattccatattggatgtgagatgatagctcattgtgttttttatttgcatttttccaatgattagtggtattttgcatgtttaatatggttgctagttatttgtatatcacctctggaaaaatgtgtattccattcttttccttatttcttaatttttcatttacttttattcaataataatattaaatgaaatctttttatttgtatgagttacatatattttagatattaacatcttatcggaggtttgatttgcaaatattttgttacattaagtttccttttgactctggcaattgttttctttcattcacaatcattgtcttgtagtgcgttttatgtatttttgccttctttcttgttccgttgttttagatatattcttgctcttttgcctaggctggagtgcagtggtacagttatagctcattgtatcctgcatctcctaggttcaagtgatcctcctgcctcagcctcccaagtagctgggactacaggcatgtaccaccatgcctggctaatttttaaaaattttttgtggagacagggtcttgctgtgttgcccaggctggacttgaacccctaggatcagtgatcttcccacctcagccttgcaaagtgttggaattacaagcatgagccactgctcccaaccagaatcgtctttttctttattcttcttctggttctatccattttcaaaactggaatattgaaatcaactataatattgtggagctatttctctttggagttttatcaagttccattctatacttagtttttttaaatttacttactacttttaatagagatggggtcccagtgtgttgcccaggcttatctcaaactcttaggctctagtaatcctcctgcctcagcctcccaaagggctgtgattacaggcatgagccactgcatccagcctcattctgtacttaggagctctgacacttggtgtttatatatttataattgttgtatcttcttggtgaattgagtctttcatcattttataataatctttgtctcttatggtttttgaataaaagtctattctctcatattaacactgctacctgtactttctgctggttcctgtttgcatggaaaatatttttccatcctttccatttcagcctgtgtgtgtccttagaattaaagggagtttcttgcagatgggatttagtaaatcttgttttcttctgattgcaaagttaaatcaggccaacattacatgaaaaggagaatatcaaacatagtaactattaaaaacaaaagaatacatattagattattatctgtagattttttaaatcttgtagatttttttcccctacatgtctttcttactgccttttgtagtattttgcttgtttcatcatagtaacatacttgaatcccatctcttgtgtgtgtcggatagattttctctttgtggttagcattgcagctacttcaaatactgtgaaattgaaacattctatttttaaatattaacagtgtaactttaggtacagaaaggtctacttcacaactctgctctcactttctgctattaatggcagaaattattttgatatatgttatggtcccattaacatatatcaaaaaagcttctgagaaaaagcagggattcttaaggaaaatctatacatatatagtgctttttaaatgattttgtcttttaattactaggaaagaattatgggaggctgaggcaggtggatcacctgaggtcaggagtttgagaccagcctggctgacatggcgaaaccccgtctctactaaaaatacaaaaattagccaggtggggtaacgcatgcctataatcccagctactacttgggaggctgaggtgggagaattgtttgagcttgggagggggaggttgcagtgggccaagatcacgccactgcactctagcctgggtgacagagcaagactctgtctcaaaaaacaaacaaaaaccattaaaagtcaagttacaaaagaaaagagtaataataaatatctctatatttgattatttactgacctttaatggtgaactttctattttcattgaggttaaagatactatttagagaccttttattttatattgaaggagtccctttagcatttcttgttgggtaagtctagaatactaatgcactccctcagctcttcattttctaagaacatctaaatttcttatttttgcaggtgaatgttactaaatatagtattcttggttgatatttttgctttttttaaaaaagtattttcaacatttcctctcactgccttctagcctgcaaagtttctgttgaaaaatacacataatcttatacagtttccctttatgtgacaagtcttttttgttgctgctatcaagactgtttctttgtctttgacttttgataatttctgtatagtatgtctctgaatgtccttgggttcgttttagttagcattttagtttagttagttgaccaagcttcttgaatttgtatatttatttctttccttagattggggatgtttgaacattatttctacaatggtgatttcgaatcttctgtcttcctgtgaatctccaatagtttgtatattgttccacctgatagtatctcaaaaatgtactagggttggttttcttcatcattttttctttttgctctttggagctgattcttttgaataacatatctttcaatttgctcattgttttctgttccttttgcagtctgctgttgaatcccttagtgaaatattacttcagttatcatatttaagctccagaatttctgttcttttggttttagtagtttctcctgtgattggtattctttttcttttcatgtaatgtttgcctgattttatttagttatctgtctctgttatcttttttagctcattaagcatcttaaggcagttgctttaaatacctgtcaagtaattcagagggctgcctatttttaggcttgttttgtggagattgattgattgatcataattttagccatatttccctgtccttttgtaggcctcgtaatttttggtttaggtttggtaaagcaaccacttctcccagttattttgtgtaagcgttgtgcaggatacctttactaattagcctgctataaagggtataggaacagccactccttttctggggatgtgtttttttcctggcgtgtggaagtactattactaatgactatacagctgctctaaaagttctgattttccttaagaggctcatccctgctttttctcaaaagctttcaatttctgttgtatttttctgctcataatctctctcaaactcacccataatccacctgactcctgcaggttccccactgctccagtgcatccttccgtcccttttgttttctgcactgccagcatgatacacacagtatgctgatattccttcccatgtctgagtcaggtgaggcagaatctagtctctctgtcagacactgaacatgccattgtcatgggttgaagttccacttttttctttcttttttagagagcagctctaaattgggaagcaatgccggaaacaagtctcttaaaaatcaacttggattaacctttcagttacatctgagtgaactgcagctatttcaagctgaaaggaatatttctggatgtaaacatgtcgaaaaacctatcaacaattccttagtttcaccacttcaaaaaatttattctagtgtcaaatcccacattttaaataaatacagaaatgattttgatgattctccatttctcccacaagaacaaaaagcacaaataagggaaaaaccgtgtgaatgtaatgagcatggcaaagcctttagagtgtcttcaagacttgctaacaatcaagtaatccacactgcagataacccttacaaatgtaatgaatgtgacaaggtcttcagtaacagttcaaaccttgtacaacatcaaagaattcatactggagagaagccttacaagtgtcatgaatgtggcaagctcttcaatcgaatttcactccttgcacgacatcagagaatacatactggagagaaaccttacaaatgtcatgagtgtggcaaagtcttcactcaaaattctcaccttgcaaatcatcacagaatccacactggagagaaaccttacaaatgtaatgagtgtggcaaggtcttcaacagaaatgcacaccttgcacgacatcagaaaattcatagtggagagaaaccttacaaatgtaaggaatgtggcaaagcattttcagggggttcaggccttactgctcatcttgtaattcacactggagagaaactttacaaatgtaataaatgtggcaaggtcttcaatcgaaatgcacaccttaccagacatcaaagaatccatactggagagaaaccttatgaatgtaaagaatgtggcaaggtcttcaggcacaagttttgtctaaccaatcatcatagaatgcacacgggagagcaaccttacaaatgtaatgaatgtggcaaagcatttagagactgttcaggccttactgcccatctactaattcacactggagagaaaccttacaaatgtaaagaatgtgccaaggtcttcaggcatagattatccctaagcaatcatcagagatttcatactggagagaaaccttacagatgtgatgaatgtggcaaggacttcactcgaaattcaaaccttgcaaatcatcacagaatccatactggagagaaaccttacaaatgcagtgaatgtcacaaagtctttagtcacaattcacaccttgcacgacataggcaaattcatactggagagaagtcttacaaatgcaatgaatgtggcaaggtcttcagccacaagttatacctaaaaaaacatgagagaattcatactggggagaaaccgtacagatgtcatgaatgtggtaaggacttcactcgaaattcaaacctggcaaatcatcacagaatccatactggagagaaaccgtacagatgaaatgtgtgtggtaagatctttagtaataattcacaccttgcacagcatgagataattcattcatgagagagttcttacaaactgagtatggcaaactcttcatgctaagttctagcattaatcaacatcagagattccatactaaagagaaatcatagcaatgtatgtgaatcaggtctcttgaggcctgccaaatgactagatatcaaaacatacatcttggatgaaaccatacagatggattatgtatgctgaggctattattcaaggaccattactatggaacatgataagatttacacaagcgataattcagtctctagttctccaatatttatgatactgcatgctgcagaaaagtcacagctccaaatacgttgaatctcatgacgcgatgcatgtcgaaggtccaagggcatgtggaaatggtcagttatattcaggcaattaaaaaacctaattatatggggttttttgaaaaggctactttacattttatgactttcatcctcaactctgaaatcacttcatgtgacttctttacagacctttcactgtggtctcttgaatcagtaggatgctgggcgcggtggctcccgcctgtaatctcagtacttttgggaggctgaggcgggcggatcacgaggttaggagatcaagaccatcctggctaacatggtgaaaccccatctctactaaaaatacaaaaaattagccaggcatggtggcagacgcctgtagtcccagctactcgggaggctgaggcaggacaatggtgtgaacctgggaggtggagcttgcagtgagctatcacgccactgcactccagcctgggggacagagtgagactctgtctcaaaaaaaaaaaaaaaaagaaagaaaaagaagcagtatgatgacagggatgacttcattagctgagaatcatttctatcagtttgccgaggaagaaggacactgcgttttcttattattgtctgatttagagagcatggaggtggggaggaatcatataaaatgatgatggcagtcatcatactgttgctgagcacttttttcctgacagaatggcacagtgcttctgtgctctaccaactagccatgaaatagagcatatctgtagaaatcatgcaagggagatggtgggcactaggactgcatagcaatcactgtttaggcaagaatgattaaaaagtagtcatttttggctgggcgcggtggctcacacctgtaatcccagcactttgggaggcaaggtgggtggatcacttgaggtcaggagtttgagaccagcctggtcaatatctccaaaccccatctctactaaaaatacaaaaattagctgagcgtggtggtagatgcttgtaatcccagctactcgggaggctgaggcaggagaatcgcttgaacccgggaggcagaggttgcagtgagccaagatcgcaccattgcactccagcctgggtgacaagagcaaaactctgtctcaaaaaaaaaaaaaaaaaaaatagtggtcatttttgaaatggaagagagaacagttgattagagaatttaaactaccagtatgccatgttcttgagtagcatttacatttaactgttggcataatttccaactgtttgatttagaatgtacatagttctcatgttttaattaataaaattttcctaagtatgaatgaatcacatcatttctaccaattgttttagtcccccttaggagaatatactgcacagtaatgcaacattaatagtaaatactctgcaatttggttttctttgtcttcacactgagttatgtagcagtgatatgtgtctaatcactctaactttagtgtaaaataggcatttttaaaaaatgcaccattaaggttgacgcatccagaacaattttgtgtgtgtgaaatcaacatatgcacacacttgtggtgcatatccttgggtaagtataatttacactaatcatacttaatacttgagttattctttctgtgccacttcagcctcctacaccctcaaaagtccatgaaacattcactgttcattatatttctacgtgcctattgtgtgccaaggaagactcatggcatgcaccttaatttttatgaagcaaaaatacaaatatatgacaaatacttttttttttttttgagacagtgtcttgctctgtcacccaggctggagtgcagtggcacaatctcggctcactgcaacctctgcctcccgggttcaagcaattctcctgcttcagcttccctaatagctgggactacaggcgcacgctgccacgcccagctaattttttgtattttattagagacggggtttcaccatgttgcccaggctgttctcgaactcctgaactcaggcaatctgcctgcctcggcctcccaaagtgctaggattacaggcgtgagccactgtgcctggcgacaaatactattaaatgaaagaaagtatgttaataagagtgaaaatactgtaccacaatgtcttttttttcctagtagtgcatgtcttttttttttttcctagtagtgctcagtgacgtaagtggaaaatattaatgttcataaattttctttttttttttttttttgagacagagtctggagtgcagtggcacgatctcggctcactgcaacctccacctcccaggttgaagcaattcttctgcttcagcctcccaaataactgtgactacaggcgcgcaccaccacgcccggctaatttttgtatttttagtagagacaaggtttcaccatattggctaggctggtctcaaactcctgaccttgtgatccacccgcctcggactcccaaagtgcggggattacaggtgtgagccactgcgcctggcccataaattttaagaatggtcacatagaatgggagttttttttgcttttgtagattaactagaaacttcatatacttccccttacaacatttttggcaatttgaacttttttttttttttttttttttttaggcagagtctctgtcaccaggctggagtgcagtggcgcgatcttggctcatggcaacctctgcctcccgggttcaaacggctgcctcagcctcatgagtacctgggactacaagcgtgcaccaccacgcccagctaatttttgtatttttaatagagacagggtttcaccatgttggccgggatggtcttgatctcttgacctcgtgatccacccgcctcagcctcccaaagtactgagattacaggtgtgagccaccatgcttgaccgataatttgaacttttgactgctgtactggaatttgtttgaagtccacctaaagtttgtattatatattgagaatgatgatgccatacactgatatggtctgcaaatgtttactacataaacatttacatgaggctttctggggaaagcaggatggacttccccagctggtccaaattggagaacagggataggtgagcagcctgggatgttgtattagtctgttctcatgctgctaatacagacatacacaagactaggtaatttataaagaaaaagaagtttaatggactcacagtttcacacggctagagagacctcacaatcatggcagaaggtgaaggaggagcaaacacatgtcttacgtggtggcgggcaagagagagcccgtgcagggaaactgccctttataaaaccataagatctcatgagatttattcactatcatgagaacagcatgggaaaatcccacccccatgattcagttacctccccccgggtccctcccacatgtggggatcatgggagctgcaattcaagatgagatttggtggggacacagccaaaccatatcattttgcccctggtccctcccaaatctcatgtcctcacatttcaaaaccaatcatgcctccccaacagtcccccaaagtcttatttcagcattaactcaaaagtccacagtccaaagtttcatctgagacaagcaagtctcttctgtttatgagcctgtaaaataaaaagcaagttagttatttcctaggtacaatggaggcacaggtattggataaataacgcccgttgcaaatgggagaaattggccaaaacaggtcacaggccccatgccagtctgaaatccagcagggcagtcaaagctccaaaatgatctcttttgactccgtgtctcacatccaggtcacacttatgcaagaggttggttccagtggtcttgcagggaacccatgtctgcccctgtgactttgcagggtacagctcctctcctggctgctttcacaggctggtgttgtgtctgctacttttccaggcacatggtgcaagctgtcggtgaatctaccattctggggtctataggagggtggcccttttctcacggctgcactaggcgagtagtgagtagtctgtgtgggggctccaaccccacattttacttctgcactgctctagcagaggttctccatgagggctccgcccctgcagctcacctctgctccagttccaataaagttcctcatctccatctgagaccaccttcagcctggactttttggtcagaaccattcaacaaccattttctaggaagctccaaactttcccacgtcttcctgtcttcttttgagccctccaaactgttccagcctttgcctgttacccagttcaaaatttgcttccacattttgaggtatccttatagcagcaccccactctataccattaccaatttactgtattagtctgttctcacgctgctaataaagaaatacccgagactgggtaatttatgaagacaaagaggtttaatggacacagttccatggggtcgtgtcccccgtgcttctgccacagggccatatagacagctcttatcgcggagttttcctgcctcaaatccttcagtgtcccctgcactggcccgcaccttttttaaagtcctcaccgcaaggttgattcccgccctgggagcttcccatctgctccgctccctcgtcagctcctggagcgcagcgacgcagccccagtcccagggaggccgtgaactcttcctggtcctgggatcctgcagaccctgcccctctcctgactttctcctgcctttttcctccttgatcgggggcccttctgctccccaggcctccccttctcctgatatcgagtgtggggacgtgacttctatctcaggacgttaaggtttctcttgtcccaaattccatcccacaggaaatgggctcttgaggtggggatctgactgcagtcccctccctatgaatgtgtggaggagaggaaatagaaaaatggtgaaatgggaaagaagaatgaaggagacccataaacagacggcagctgggtgcgatggctcacgcctgtaattccagcactttgggaggctgaggcgggcagatcacctgaggtcaggagttttgagaccagcctgaccaacatggagaaaccctgtctctaaaaaatacaaaattagccaggcatggtggcgaatgcctgtaatcccagctactctggagactgaggcaggagaatcgcttttacccgggaggcggaggttgcggtgagccaagatcgcaccattgcactccagcctgggcgacgagcaaaactccatctcaaaaaacaaaaaacaaaacaaaacagatggcaaagtagatggtggatgagggatttgcagagacagtgcatgaagatgctgagaaaggagcagggggagaaaagcaactagagaaatttagagaaaaactgggtttctagagagataaagttcagcaagatagggagaggggcagaaaaggggaggctcctcagatggagagttggggagagaaggagggatttggagccagggcagacagagcagcatggtgctgggagagcaagaggggcagccagtgataaggagagcacagggagaaccacagcctggggagaactgggatctggggatgccagagaggggacaggtggatatagcagggaagaggggatttaacaggggaagctagggggcagcagagacggggggaagaaagaggcagaactatatgaaaattggagacaaatattgggcagaaagaagaataagaggtgaaagaagtgagaaaggagcagaacaagtggaagagaaggaatagagggaagagcaggagaaggaagaagggcttgaaatgaggagaatcctaggggaaaaataaagagaaaaaaaaagctaggaaaagaaggtgagaatgagaggtaggtagagaaacacacagtaatgaggaaagagggggacactcaatccagatgaatgatgaattgattggatattatgattaatttctctataataaacatcacatttgtttaaaatatacagatgaagatgagaattggaaaactgtctataaggcatgtgcatttcctaattcttggtatcagaggttagcttccatttgctgtccttattctgccagacggcaggcagtgacttgactcattcaggtatgggtcactatcttcacttctgggatggggtagggtgtgtgagtgtataagataggaggaaaaaccaaagtgttttttctactcacaatcaacacaatagtgaatgctcaacacagaatgcctcatctccggtcatcaaaatgtgtggggattacttcccaccaacaagctatttttcatcagataaaaactgggtgttctctaattgaactcaatttgacaccatttatagggagttagcattagatctcacaggaggctgagggctcagttgcacaaaactgcccccagaatttgctattgctagagtgatttacacaacttggagaaacaatttactgaggtgtaccatttgttataaaggatgttacacaggacacagatcaacagccagatggaagagcattcctaataaattaatggaaacagaagtatgttttggaaaccatggactgactttctttctctttctctctttccttcctccctttctctctctctttcttttctttcactttgacggagcctcgctctgtcacccaggctagagtgcagtggtgctatctcagctcattgcaaccgccacctcccgggttcaagtgattctcctgcctcagactcccagggagctgggattacaggcgtccaccaccaaacctggctaatttttatatttttagtagagacagcatattgccacgttggccaggctggtctcgaactcctgacctcaagtgatctgcctgcctcggcatcccaaagtgctgggattacaggcctgggccactgcacccagcccagggcttgagttttaaaggtgccacagtacaccttggttctctttttttataaacaggaatctgtcttcctgacctgagtattatctctatgtgggagcaaaggagagagccctggactctggagagtgaagggaaaatagcaaaaaaatccagatgggagggaatggatcaaaggtgtgaacacaggtaagagctcagatgggcagagtggaagctgtatatatatatatattttttgagagacagggtcttgctctgttagccaggttggagtgcagtggcaatcatagctcactgcagcctggaactcctgggctcaagtcatcctccttcctctgcctcccaaactggtgggattacaggtgtgagccactgcaccctgcaaagccacactaataaatagtgtttgggaaactctgcaactgggagaattctgtggaaaaccaatagtataaatcctgttagttttttttttttttttcttttctgagacagagtctcactctgttgcccaggctggagtacagtggcgcaatctcggctcactgcaacctctgcctcccaggtttaagctagtctcctgcctcagcctcctgagtagctgggattactggtgcctgccaccatccttggctaatttctgtatttttagtagagagagggtttcaccaagttggccaggctggtctcgaactgctgtcctcatttgatctgcccgcctcagcctcccaaagggctgggattacaggtgtgagccaccatgcctggcctaaatcctgttagttttgaatggaaattttctttctttcttttttttttttctgggacagattcttgcttcgagacaatgacaaatacaaactaggtttactgtaaatatgagaaagggaaaaaatacttttattgtattagaagacttgaaatcacatgaagtgataccaatcttttgttgttgttggtcagatgttttagctattttaggtgtttgggttttttgtctttctacataactgctaaccttgttagtatctgcagaatgccttaattaggaaaggtattaaccctatgtgtcagatttgtataattcatattgctttacatggagtcttccaataaatgtatatggtatatgtctctatttgctgtctttgatttcttttatcagcatttggtagttgtaacataacagttctatgaatgttttgtttcacatgtatttctttgccccccccctttttttttttttttttttgagacggagtcttgctctgtcgcccaggctggagtgcagtggcgcgatctcagctcactgcaagctccgcctcctgagttcacgccattctcctgcctcggcctccccagtagctgggactacaggcacccgccaccacacctggctaatttttttgtattttcttagtagagatggggtttcaccgtgttagccaggatagtctcgatctcctgacctcgtagtccacctgccttggcctcccaaagtgctgggattacaggtgtaagccactgcacccggcctctttgacctttttcttaatggagcaatcatacatagtattttatttttaatatcaggtttcatgtgcaaattgctagtgtatagaaatatacaagattattattattattattttgagacagggccttactctgtcatcctggctggagtgcagtggagcaatctcagctactgcaacctgtgtcctgcaggcttaagtcatcctcccacctcagcttccccagtagctggcactgcaggcatgtgccaccatggcctgttaaatttttgtgttttgtagagatggggtttcaccatgttacccagcctggtctcaaactcctgagcttgagtgatctgcctgccttggcctcccaaagtgctgggattacaggcacgagccaccatgcctggctgatgaaatatacgatatttttgtaggttgaccttatactttgctacctttacatttttcttgttctagagatttttgtagatttttttggaattttctacataaaatcatttcatcagtttcctattgctatacacagtgattggcttaaaacaagaaaaatttattcttttataattctgtaagtcacatatctaatatgggtccatagttctgtgattcttcattaatctccaggggagaatttgtttccttaccctttgtaggttccagaggccacttacatcctttgactcatggtccacttcctccatctttaaaggtgagaaaaaaaatctctttatccctctattttcaacacatcaccactgtctctgtcccttcgcatccacctgcacccttctgatattgaaccttgtgattctatcactttgaccatataattcaggatgtctatctaaagatccttatctagaccacatttgcaaactcccttttgatatatccagtaacacaggtcatagggatgtagctaccttcctttgggaaaggtattagcctgcacaaccaacatattttctgttggtacactattttttttgtcctgtcctcaggccaccctccttcctcagcctcccaaagcactgtgattacaggcctcagacaccacacccagcctgtcacttttatttctttttcctttatttcactggctggaacctttcatattgtgtggaatagtagtgataagaggggacattcttgccctcatcccaacctctaggggaaactatgctttcaccagtttgtatgatgattctgattctgtaaggattggtaggtgatcttgagttgaggaagtttcccatgatactgctttccatactgaccgcagtatttcagattcccacaaaatgtacgaaaatagtttctccacatccttgcttgtgaagcaggttcactgcacactggttgccaatgtgtctgagttgagtgagagataatctcacggacacacagtaagttacatgaagtgaatttgttacatacagatcggcagatacctgggattcatgcattctgctccccaaggctcaggaaaaccacccagtgcagatgcagtctctctgtatgtgttcaacttgcatcacagctgtgggaggctggaaggcggcccatcctgggtttcatgctccagggatgcatggcacgttggcctaaagcaacaaaggggatcctgttctggggatctggaacacatcctgtccttttctcaccggtcccttcctctcaggatgttgcttttccagcacattctatattcattcttgggaactacaagtgagaagtcagatgcaactgggccaattcaaccccacttgaatgctgtcctgcagtctctccgccaatccagatatcccttttatttttatattttttgagacggagtctcgctctgtctcccaggctggagtgcagtggcgcaatcttggcttactgcacctccacctcccagattcaagcaattcttgtgtctcagcctctcgagtagctgggactacaggcgtgtgccaccatgcctggctaattttttttttttttttttttgtatttttagtagagacttcgtttcaccatgttaaccaggctggtctctaattcccgacctcaggtgatctgccctcctcggcctcccaaagtattgggattacaggcgtgagccaccacgcctggcccagatatcccctttaataaagctagtccatttacatgtgcactgacctccctggatctggaggtagaggctggtctcaggagattgaagtaatacctcgactggcagaatctcagggcaacatcattgaggtacagccagttgcatttcactaggctcaagaggattgctgcctcaagcaggataaccaggcctgcctggagcagtgccgtagtccaggatcccagtgacctaggtgagaagttggtactcagatcaaagaaaagttcttcaggtgaccccactgtctgcagccaatgggcctgcttgtgggccttatgtatttgtgtttcaaaaataacctgagggcttgatgtgggggtccttatctcccatgcaaggtgattcatgcctataatccgagcactttggtaggagcagatgggaagactgcttgaggctagaagctggagaccagcctgggcaacaaaaccagactacatctctattaaaaacaaagcaacaaacagtagaaaattagcacagtggagaggcacaggcctttactcacagctactcggcaggctgagacagggggtcacctgcccaggaccccaggaagtcaaggttgcagtgagctatgattgcgccactgcatttcagcctcggtggcagagaccctgtcttaaaattttaaaaagtattaaaaaactaagttggaccgggcgtggtggctactctggaggctggggcaagagaatcacttgaacccaggaggcggaggttacagtgagctgagtgcctgccactgtactcccgcctgggggacagagggagacgctgtctcaaaacaacaacaacaacaaaaaactacgtcgtttatggctatttttataagttactggctttttttttttaaagaatcggtgacttatcttcacactggccttagtcctccatgcccaacacgatgtccctaggaaagtctctggaattgagcacagggttgaccttcaccgtctagagtgaatggggaagataaatgaaaagtatttatcttctatgggcactggcatgaaatagaacattctaccctggcagggttttgcatttcacattttagcttgcatcatccccttcacagacaattccaaagtgtgttaattcaattcctaaagcttcccttcccttcctcccttcccttccctccttacttttctttcttgtccatttattttcggtttttttctctttctttcttggttttctttctctttttcaacttctctttcttttctctttctctttactctctctcttctctctctttctgcttccagggtaggtgggacttgaaattcattttaatagaaggaattttcgtggatataatctacaaccgattttgctctgcgcaggtaagatccgttttcagaccaaaaccctgaaaacaagcgcagccagtcaagcgaacggaagcgcaggcccggcccaggctttgtcccggcccgccctggtcccagccagtccggcctctaggatgcgcgcgcaatttcgtgcaaacccggaagcggaccgcggggggcgaacgcctagagcgcagtttccggtagacccggaagccgattgcagggagaaactgttttcgcagcagtgcgtgagtttccctttgtctatgttaagtctaggctagccagttcttctctgcttctatacccgggagctgaggggcatgcagaccttgaaatcccggcaccgctccctccaccccgagtaaattcagacatcctttgagagtctgggagtcgctttctgcgtgttaaaatcgcttggaggctggtcgtgtgcccggtctttttgtcatttacccacgtagacacctcctatcgtggggtttacctgcttcaaatcctttagtaacccctacacacgccccgcaccacgtaaaatcctcactctccgttcccctagcctcgcccttctttgcccctagagctcagcgccccaacagggcacgagaggcctcgtcctctgcccagacctggtttctgcagactccacccctctcctgacccactcctgcctttttgctccttaatctggaccctctgttccccaggcctcccttttccagccaccggttctcctgaccccgagtgtggggggtgacttcagtctcctgacatccagtgttctctcgagccagtttccagcccacagaaaatgagctcttccggaagtgggcatcttattccaatcccctccctgtgaatgtgtggagaaaaagagatgggaacgaggcagaggaaatagagaaattttgaaagagaaatgaagaatgagagacccattaacagaaggcaaagtagaaggtgagtgaggggtttgcagaggcacagtgaaagaaggtgccgagaaaatagcaggggagaaaagtaactgtaaaaatatagacaaacctgggtctgtagaaagacgaaattcaacaagatagggaaggcttctcagacagaggggggagaggaggagggatttggagccaggtcagacagagcagcgtggtgctgggacagccagagggggcagctggtcacaaggagaacagggagaaccacagcagggggaggcctgggatctaagggtgccagagagtggggacaggggtgtgtaatatcgaagatggaatttaacagggagaccccaaggggagctgagatgtgggaggaaagaggcagaaatatatggagattagggacaatgaaagattgggcagaaagaggaataagaggtgaaacaagttgtaaaaatggatcagaacaggtgggagagaaggaatagagggaagaatgggacaaagagaagaggagggactcaaaatgaacagaatcctaggggaaaatagagaaaaaaagagctaggaaaaaagatgagaatgagagatatgtacagaatgaggcagggaaacagtagtgaggaaagagggggaccctggttacagatgagtggtgagttgattggaaattatgattgaattgtgacatattaatttttctataatataaaatttgtttagaacacatgaggctaggagctgtggctcacacgtgtaatcccagtactttgggaagctgaggtgagcggatcacttgaggtcaggagttgagaccagcctggccaacatgtgaaacccatctctagtaaaaatacaaaaattagctgggcctgatggcctgcgcctgtaatcccagctactctggaggctgaggcaggagaatcgcttaatcctgggaggcagaggttgcagtgagccgagatcgtgtcactgcactccaggttaggtgacagagcaagactccatctcaaaaaacaaaaaacaaaaaaccacacatgaagatgagaattggaacactatttataaggcactcttctcttttcttgggatggactagggtgtgagtgtataagttaggaaaaaccagtgtgtttttgtgttcacagtgaacacaataaagagcgctcaacacagaatgcctcatctctggtcaccaaagtaatatgggaattacttgtcaccaacaagcagttcttcgtcagacagcacctgggtgttctgtaattttactcagtttaactggtcagtgtaggaacaaccacagacacattttgatcactaaaggtgagggattctcctttgggtgtgagagtagtaaaaacagtgtggttttttcctgtctcaaacagtaaggggaagaattttccaacaggcccactcacctgtctctaggactgtgttcttagtagtgactgggaattgtctgtccctgctcctggctgctgctgatgctgagactgtgtgccacaggccagccccattcactctctcctgatgccacggcatccctcctccacagtgtcatcagattttacttcaagggaattattttggtcagcatacccagatggagttgttgcccattaaaacacacacacacacacacacacacacacacacacacacgcctttattttttccactatttcatcctcagaagaaaaaacaaagtattagctacatttttacttgcaataagtatgccttttctgtgctccatgtaagagcacaatataccaaaatcttgtttaggcgctctctcactctttcctccatttcttgcttgaccccatccaatcaggttttgacaccaaccattccactgctcctttttttatctgagtcaccagtgacttctctgtttctaaatctagttatttatttattcatttaatttttagagacaaggtcttgctctgtcacccaagctggcatgcagtggcacagtcatagttcaccataacctcaaacccctagactccagcaatcctcccgtcttagcctccagagtagataggactatgggcctgtccctctgcgtggctgattgaaaaaaaaatttttttttttgagacaaagtctcactacattgcccaggctggtcttgaactcctgacttctagccatcctcctacaaagaagtcccagcatgctgggattagaggcatgagccctttaccctgcttaaatctgactttgaattttctgtcctcctgtctttttctgtcagcagcatgtttcacagctgatcactcttttttttcgcagctttgaagacattgcttgtatttttaaaaatctgtttaaaatttttctcattactttcgtatcttatcagtttcctctgctgctgtctcctgaagtgtcttctctgaatatggaaatgtcacccaatttagtccttaaacctgttctgtctgcccacaccctcagcttttccttttgatctcatctatggttttaaacaccaccaacatgtctccattttccctcttcacccacccctctcccctgaattccaaaatcctgtgtccagtcatgttctcgacatctctgctgggacatccacaggcatctccacctccacgtgtccaaaataggcttcctgaactcccccagacatgttctccctacagtcctgcatagctcagatgacagacaccttctactttctggggattaactaaacctgtcagaatgtgcttaaaatatatgagatactatttgtgttttaatttctaaggtacagaataagtgacatatttacttaaaatgagtgaggaaatagattgtttcaaaatttcttttgatgtgtaggagaaaatatttgaagagctcagccctgcctgatctgcttccccaggacctctctgacctcatctcctgcctctgttcttcccgctccctctactgcaactacacagccccctttccttttctgagagcgttttgtatttttaaaataagtgcttgatcaaagtatgattttaggaatcacagtttattaccacatgaagaattgcttttttttttttttttttttaggttcacaaattttaagaaagggagaataaagtgaaaaaaatctcagaaggaatccactcaacagacgaggtaccttaaccacataatggttgatttccaaaattattaacatctgcttgctcagttaggataaatcagacctatgtagaaagtcaaagtttgaggattacctcagggtgaggtcttccctttgtgtgtggctatggcacaggaaggaggtatgttgattctaagccctaagcagcatatttttgacattcaggattcacttccaaagagacatattatgcaaggaagcaacttggaagaggaaagaaaagaagtcaggaatggcccttactcaggtaaggtaatgttctcagtggattgttctgtctctgtttcttcctgaaatgccaggcattggagttgctaatctttgactctgaagcatcctgcctgacacgtttgcttgcacttacccatggcttcttccagtcccttcatttccgcttgagatttcagttcactgtgacccattgacatgaacttgggaagaggctgcactgggcatggtccgggggagggctctcagcagacatggatggagacggggtgtgggtcccgtggtggcagtgctgctgggcagcagggattgttcagggatcacatctggatgcactgtcagtgttctgtggactagaattagagaagctgcacgtcaaagttcctttctttcttctttcttttttttttttgagacagagtctcacacgttgcccaggctggagtgcagtggcatgatccctgctcattgcaacctccgcctccctgattcaaaggatttttccacctcagcttctcatgtagctgagattacaggtatgcaccaccactctaatctaatttttgtgtttctagtagagatggggtttcgccatgttggccaggttgatcttgaatgtcagcctcaagtgatctggccacctcggcctcccaaagtgctgggattacaggcgtgagccaccacccccagccatatccaatgatttcttaaggtatagggtgctgaggtattttctttgcccttaatatgttaaattagtacattaatttcctgtaacatatcacctttttattaatggaataaattagtaaacttaattaaattttgttaatacctaaataacaatattttaatggacgaagcttcatttataggccagaagcagtgatgtgtgcctataattctagcttcttgaggggttgaggtgggaggatccattcagcccaggagtttgagactatcctggacacctagtgagatcctgtctaaaattttaaaaatattatgtttttgaatatggatatttagtagagattggagttcaggtttctgtggttttacatggtctcccatttttaagtacttaccatatgtttataaaataagttggtacaatttatacatttttattgtggcaaatatgctgaaatacacattgggaaaaatagtacttacaggtaggcacaatggtgcatgcctttagtttcccacttgggaggctaatgaggaaggatcctttgatgccaggagttcaaggttatggtgtgctgtgaatagccactgccatccagtttggacaatgtattgagaccctgtgtctaaaaattgcgaaccaaactaatgatgaaaaatatgtaaaaaataggtcactgggacagggtgcagtggctcacccctgtaatcccagcactttgggccaaggcgggcagatgagagggtcaggagtttgaaaccagcatgaccaacatagtgaaacccatctctactaaaagtagaaaaattagccaggcatggtggcgcacatctgtagacccagctacttgggcggctgaggtaggagaatcgcttcagcctcagaggtggagattgtggtgagccaagattgtgctactgcactccagcctgggcaacagagcgagactccatctcaaaaaaaaaaaaaaaaaaaaaagtcagtgagagacaacttctcttatttcaactgatgtctataagtgtgtatgtgtactagtgtatatgagtgtgtaagtgtgtacatgtgatgtgtgtggatgagtgcacaacagtggtttttatgaatggcatgtcatctatataaattttatgttttttagtcagttgaaattacatcttaaatatttaccaggttaaaatttttctatactatcatgctaatgagctgatagctataagaataataatgtattatggggacatataatatattatatatatgcagatataatgaccttttaggcagttttgtgtttttaatccttgaacttgttttaagtttactgaattaggtaattgtcaattttcttttgatcctgatctgttacttaactgtttgattctttaggtttgattctaatgtccagacacctgggatcccatgcttacactgccattgttagtcctgacacctggggcgagtttcctagaatacatgtgaaagagttgtctcttcagtaagataggaacagattattctttcttcttttgtttgtttttttaggtgaagtctcgctctctcacccattctggagtgcagtggcgagatcttggctcgctgcaacctccgcctcccgggttcctgcgattctcctgcctcagcctcccaagtagctgggattacaagcgcctgccaccacacccagctaatttctgtatttttactagtgatggggtttcaccatgttggccaggatgctctcagtctcttgaccttgtgatcgcctgccttgtgatcctccagttagttcatgtaaagcatttaaaatagtgcctatcacatgggaagtgttccattcagccattgctattgttatcatcacagttttcagattttgatcattttttattttatttgtttttttgagtcggagtgtcactcttgtctgttgcccaggctggagtgcagtggcatgatctcagctcactgtagactccacctcccgggttcaagagattctcctgtctcagccttcttagtagctgggattacaggcactcaccaccacacctggctaatttttttctatttttagtagagacagggttttaccatgttggccaggctggtctcgaactccttacctcaggtgatccacctgccttggcctcccaaattgctaggattacaagcatgagccaccacacctggccaagattttgaccattcttaaaaactacaataggttggggccgggcacagtggcttacgcctgtaatcccagcactttaggaggccaaggcaggtggatcaggaggtcaagagatcgagaccatcctggccaacatggtgaaaccccgtctctactaaaaatacaaaaaattagctggtcgtggtggcaggcacctgtaatcccagctagttgggaagctgaggctggagaatcacttgaacctgggaggtggaggttgcagtgagccaatatcacaccattgcactccagcctgggcaaaaagagcgaaacaccatctcaaaaaaaaaaaaaaaacccaaaactacagtaggttgggtgtggcggctcacacctgtaatcccaggactttgggaggccaaggtgggaggatagcttgagtttaggagctcaagaccagcctgagcaacatggtgagacaccatatttataaaaaatacaaaaattagccaggcatggtgtcatgagcctgtagccccagctactccagaggctgaggttggaggatgacttgagtttaggaggcagaggttgcagtgagtcaagattgtggcactgcactccagtctgggtgacagagtgataccctgtctcaaaaaaaagaaaaaaacactgtagacattgtcatctctgaagacaccacttgaattgaatctcaggtagatactggatatcacttggtgtgtaaaaatacctaacacttctatagagagagataaccctggattaattttttttgtattgtccaaaaatgagacatctacactgatttaaggaatgtcttaacttcttatggagaaatataataaaaccacaattacagacacgtaactggctcaagaataccttaatatggatttttcacagtgctcacataagtggagtcagtccttaacgactgtcttcccattctttgtgacgatgagtactgtgtgcataccttgttgctgaaatgtggattttctttcagggacccttgaaattcatggatgtggccatagagttctctcaggaagagtggaaatgcctggaccctgcgcagaggactttatacagggacgtgatgttggagaattataggaacctggtctccctgggtgaggataatgtcccctcagaagccgggatctgccctggtggatctctgaattgtgtcttatatgcctcttgggagctcctgcattgcttgcctgagattgaaaccatgttgactcagaattgaaaaactgtattacactttctggacttgaaatgtcccctttcttcagttattctcctccctccacaattcatgattggtggcaccagggccgaagtatgcaggaaaccttatgacaaactttaaaaatatccagttccctgttttctacccctgtgcttttgattctatagttcttggaagggggctctatgtctgcatgttacaatgttccctaagcattcagaaagaggcagtcagtagatgaatttgtgaaatactatttatgatttaattataatatcctctctcctccctaaatacagggcttggacttgggagatgccacagcacacatttattctttcttttataaataggaatctgtcttcctgacctgagtgttacctccatgttagagcaaaagagagatccctggactctgcagagtgaagagaaaatagcaaacgatccagacggcagggagtgcatcaaaggtgtgaacacaggtgagagctcgggtgggcagagtggaggccccataatttttgttttttgagacagggtctaacgctgtcatccaggctagagtgcggtggcaatcatagctcactgcagccttgaattcctggacttaagggatctccctggctcgctcttccaaagtgttgggattacagccatgagccactgtaccctgcaaagccacactattacatagcgtttgggaaactctctgcaaatgggagaattctgtgggaaaaccaaagttgaaatcttgtgagttctgaacagacatttttctttattttcctatttattttttggagataggatctctcttgggtcacccagtccagaatgcaatggcatgattatggcttgctgcatcctcgacttcctgggctcaagtggtcctcccacctcagcctcctgaatagccgggactacaggtgtacgccacgatgcctggctaatttttggtattttatgtggagatggggtttcaccatgttacacaggctagtgttgaactcctgggcacccagtccagaatgcagtggcatgattacggcttgctgcatcctcgacttcctgggctcaagtgattctcccacctcagcctcctgaatagctgggactgcaggtgtacgccaccatgcctggctaattttttgtattttttgtggagttggggtttcaccatgttatacaggctagtgttgaactcctgggctcaagtagtctgcctgcctcagcttcccaaagtgttgggattataggcataagccacagcaaccagtaaggtgtgttgtttaattggcaaatatttgtggatctttaagtttttattcttttggctgggcacggtggctcatccctgtaatcccagcactttgtggggctgaggcaggcagatcacttgaggccaggagtccgagaccagcctggccaacatggtgaaaccctgcctctactaaaaatacaaaaatcaactgggtgtagtggcaggtgcctataatcccagctactcaggaggctgaggcaggagaatcgcttgaacctaggaggtggaggttgcagtgagccgagattgcaccactgcgccctagcttgggtgacagagtgagaccctgtctcaaaaaaaataaaaatgcatttttttcttttgttaatttcaacgttacatgcctctgcctctggagtagctgggattacagacatgcaccaccacgcctggctaatttttgtatttttagtagagatgggatttttccatgttgggcaggctggtctcgaactcctggcctcatgtgattagcccttccttagcctgccaaagtgcttgggattacaggtgtgagccacttcacctggcccaaaacattctattttaaatgttaacagcttatctttgattaggtacacaaagctctgcttaacaactctgctctttctgttattactggcagaaattaatcctatatattttatgttcccattaacatatgtttataatgtttataatgctttttaaatgagagtgtctttttttttttttctgagatggagtctccttctatctcccaggctgatctcggctcactacagcctctgcctctctggtccaagtgattctcctgcctcagcctcctgagtagctgggattacaggcgcccatccccacccctggctaatttttgtatttttagtagaaacaggtttttgccatatttgccaggctgctctccaactcctgacctcaagtgatccacctgcctcggcctcccaaagtgctgggattacaggtgtgccactgtacctggcctgattgtgtcttttaaattgtaggaaagaattaaaagtcaagttacaaatgaaaagtgcaataatacttgtttctgtatttgatcatttgttgaccttttatgatgagctttttatttttatttttgggggatggagttttgctctgttgcccaggctggagtgcaatggcaggatcttggcttactgcaacctctgcctcctgggttcaagcgattctcctgcctcagcctcccgagtagctggggttacagacaccacgcccaactagtttttgtatttttaggagaaacggggtttcaccatgttggctaggctggtcccgaactcctgacctcaggtgatccacccacctcagcctcccaagttgttgggattacaggcatgagccactgcgccctgcctatgatgacctttatattttcatatggattaaagataccgtccagagtgctttcatttcatcttgaatgctcgttttagcatttcttcttggacaggtctagaatactaattaacttcctcagctcttctttaggaaagtctaaaattcgcctttatttttgcaggtgagttttgctaagtgtagtattcttcattgctgttttgcctatttttctttaagcactttcaatatatcacctcactgctttctagcctgaagatgtctgctggaaaatatatataatcttacagagtttagtattgtctgacaagtctcttttttgttgctgctgtcaagattttgtctttgtctttttttgactcttgataatttctttatagtatgtctctgtgtgaatgtatttgggttaattttaattagaatgatcaaatctcttttttttttttttgagacggagtttcactcttgttgcccaggctggagtgcagtgccatgcatgatattggctcactgcagcctccacctcccgggtttaagcgattctcctgcatcagcctcccaggtagctgagattacaggcaccctccatgatactccttttcatgcatcattttcctgatttcatttaattgtctatctcatttatgtttcagctggttaagcatcttaagacagttgctttcaaaatttgtaaagtaatcagagggctgcctttttctaggttgggtttgtggagatttgggtttttttgtttgtttgtttatttcaatgtccttatgtaggccttgtaatttttattttaggtttgctaaaacaacttctcccaggtttttttgcttgtttgtttttgtttttgttttttttgagatggagtctttctctgttacccaggggctggagtgcagtggcatgatcttgtctcacttcaacctccacatccaagattcaagcaattctcttgtcttagcctcctgagtagctgggactaggcgcacaccatcacgcctggctaatttttgtatttttagtagagacagggtttcaccatgttggtcaggctggtctcgaactcctgacctcaggtgatccgctcaccttggcctcccaaaatgctgggattataggcatgagccaccatgcccagccaggtctctaactattgacctcaagttatccatccccccttggtttcccaaagtgctgggattacaggcatgagccactgcactggctgttccagttcttttacataagaactgtacaaggtgagacctttacaaatcaacctgttgtaaagggtgtgggtgccacctgcatggaccttgggggactaaacaaagggaacaaatgtgggaataaaagacaaagacaatagagtatatttggaagaaagggtcagggggctccttgcttctaatggacaagggccctgagctttagagcccttcacattttattgggtaaaagagggagaagggtgggggtgattgtcggtcagcggcttgatttacagcaggcttgcaagactgcattctttgaacaataggctctagatgtcccagtagataatctcagtgagcacagtgccagggaatgattgcctccagcaaaccttctggcggtaggcgcagtcatgagtttgcccacatcctgcattcatgataaacagtttgctgtttggtcatatagcctccagtggaacgctgagttggtcatgtctctcaggccatcggctccctacatctcccctttgtgtttatgtattactgttacagatttgtctaagcattggcctacctaaaagttctgttggagatagggggtagagagaataaacaaaaacaaaggtttttgtggctgtagccgggaggcatgtctctgctgaagcatttgctctataagctataattcctcttcagcctgttaaggggcacagggaatttaaggaagaatctccttgcagggtttggtaaagatgtgtaagttgataggtggcaatacctagcatagggcgtagccaattaatatctcctagtatttgttgaaaatcatttaaagtctataatgtgtctttaccaagaactgctttctatggccgtacactcctctccgtaacaatatttcctacgtaatggtatggggaagttatttgcactttctctggagcaattttgggattccgtttaacaagatcttgctttacatctctgagtaattgatgtaaatttgatctgtaggagtggccagaagaatatcatccataaaatgaatgatatacgcagtgggaaacatattttgagactcctttaatgctcttcctacaaaatggtgacataatgtaggactgttaagcatgccttcaagtaaaacttgccattgatagcaagaaacaggttctctatgattaatagaaggcatagagaaggcaaattgaggcttatgcttctcgtgtaatggtataataaagaaacaatccttaaaatctattactacaagaggccagtctcttggaatggccgccggggaaggtaaaccttgctgtaatgcacccattggtttaatttgtgcattaatagctctcaaatcatgcagcagtcaccgtcttccaggcttttttggaataacaaataccagtgaatttcaggggctaactcacttctctatatgtcctgcattcaattgttcttttaccaacagatgaagttgatctagcttcccctgtgttaggggcccacacaagtttctcactaagccattctaatggtaaggcagtgggcagaggagaaatatgaatgacccccatcagaaatcctgacgtcctagcccttttctgtttttccagttactgagaacgggttagggtttccttgtaggaatttccctaaaccttttctactttcatatcccatgtccttcaacatttcaaatcctgggttaccaaagttttcatttgtaagtctcatatttcatgctgtaagtctccaccccataaattgatggctgtatttacaacataagactggaaagtacctgactgaccatccagaccaagacaaggtaaaatctcagcactctgttgaacacttttagctgctcctactcccactaggggtgtggaggttagtctgagagtcgatgctgggggccagtctttactggatatgactgacacatcagctcctgtgtccattcgcccataaaatttctttcctttaattagtactacacaggtaggtctattagaggctatggattgggatagataagtttcctatgtagttgtgctcccaaaccctttatttcctcatttctccttttatgaagatgggtgtaatttgcagggaataagcaatagctaagcagtatattctcctggttcaaaaacccaaagatcttgtgacattaaaactacttgaatttctccttcataatcggagtcagtcactcctgggactacagtgatgccttgcaagttaaggcggcctttgcctaaaattagttccatgtatcctcttggtaaaggtcctcaaatgccagtgggaattttgataggtttgtctccaccaactactgttatttctcttgactgggagatctaatcctgcacttcctggtgttcctggggtgagggaatcaatgtttctcttgggacccatccctgaaatgggcttgtggtctggactgagaatgccctgattgtttgaggggcccgggtccaggccaccttctcatttcccagcaggaggggtgccattctgatgaagtcttgagtggcactgatgagcccagtgatttcctttgttacagcgaggacagagtgctggcgtttttctgctgggtgttgggggggggcactgcattgtgaagtcctttctgtcctgagatctggtggcattcctttttaaaatgtctggttttaccgcaagtacaacattttcccaatttagcgtttgacccttggctccttttagatttgtcaactactaaattagccatgcttcagctatcattgaagagcaatgaagctcagttccttcatcctaacaagctctgagaaaatttcccaagtcttttgtacaccttacaggtgccagtgcacatttacaatccacgtttgcattctcaaaagctaaagttaaggttagcatttctgtggcagtggcatgaggaatctgacgcttcactgcctcttgtaatctcgcaagaaattgtgcatagggctcctacaacccttgcatgatatgcaaaaaggattgtactaggactccctcatctggaattgtggcccaggcgcatttagcagcctgtgaacgctgctgataagcagcagctgggggtgccatttgatgttccaggtctgaataagggtcattactcaatagcatatcctctgtaatgtctccttgacaagcagcacgattctgtctagcctggtttgcacacagttcttgccaatttaaattccgtgtcagatacgcagtagcagacaagtttgcgccaaaagttttacatcaaagagtagaaggcacgtagcaccgaatacagattctagcaatcctaaagtgaatgggctctgtactccatcgttaactacactcgtttgtaattccttcaacaactaaactctagggtattttcatgaataaactgatgtagattgtttcgatcaggccttatggaaataggaaaagcacaaggtcctaagggctctccagctatggcagcagagtgtaacattctttgtactggggtctctatttctgctactgaaggaggtggtacagatgttgctgcaactggagggggtggtaaaaaccaatttttatcctccctctcctgttttttgttttcaattggatctgtgggtgggacaacagattctttcagatttttagactcagcctgctgcccagcagaataatgagataatggcagaacagtacgaaccagactccacgtgaagatagaagaatcaactttaagacctttttgatgagcctcttttaatccttttcctgctgtgtcccaattttccacatcaagagtgcctgcctgtggaaaccatgggccatgcatcataatctcctgcagaagcttaatgtctgtgaattaacctgagttccaggctgtctcaatagaacttgaaacaactgcacgtagtgtttttttcaacagacaagttctgccccacgttaccctgattcagaaaacttcccgttcgcagtactttagagcaccgacctcatatcgctcccagtacctcttcagggcactgaccttatatccgctgccagccgactcatccaggtttccccattcaccttgtgaatttcagttcctctactccagcagaaccttctttgttcacgtcctcaaagtcctatgttcggaggccacttgtccgacatcctcggagtccctcttctgggtcaccagttgccacctgcacagaccttgggggactgaacgaagggggcgaacattggaataaaagacaaaggtgtatatttggaagaaggggtcagggggctccttctagtgaacaagggccctgagctttagagccctttgtattttattgggtaaaggagatggtggcagggggagggggtggttattggtcagcggcttgatttacaacaggtttgcaagactgcattctttgaacaatagactgtagatgtcccagtagataatttcaatgagcatggcaccagggagtgattaccttcagcaaaccttctggtgtcaggcgcagtcgtgagtttgcccacatcctgcattcatgatagtttgttgtttgatcataaagcctccagtggaatgttgagctggtcacatctcttgggccttcagcttcctacatgtgggaacactcagtccttttctggggatgtgtttcttctggcttgtggaagtaccattattaatgtctatacagctcttcttggatttctgattttccctaagaggctcatccctgcttcttcccagaagttttcagtctctgttgtatttctctgctcatagtctgtttcagatttacccataattctctcgactcctgcagattccccactgctccaatgcatcacctcagttccttgtgttttctgcactgccagcatgatacacacaataccctgatactcctaccaatgtctgagtcaggtgaggcagaatctagaccctctgtcagacactaaagatgccattatcatgggttgaagttccacttttttctttctgttttagagaggagctctaaattgggaagtaatgcaggaaacaagccttgtaaaaatcaacttggattcacttttcagttacatctgagtgatctacagctatttcaagctgaaaggaaaatttctgggtgtaagcattttgaaaaacccgtcagtgacaattcctcagtttcaccgcttgaaaaaatttcttccagtgtcaaatcccaccttttaaataaatatagaaataattttgatcatgctccattacttccacaagaacagaaagcacacattagggaaaaagcttataaatgtaatgagcacggccaagtctttagagcatctgcaagccttactaaccaagtaatccataacgcagataatccttacaaatgcagtgaatgtggcaaggtctttagttgcagttcaaagcttgtgatacatcgaagaatgcatactggagagaagccttacaaatgtcatgaatgtggcaagctcttcagtagcaattcaaacctttcacaacatcaaagaattcatactggagagaagccttacaaatgtcatgaatgtgacaaggtctttcgaagcagttcaaagcttgcacaacatcaaagaattcatactggagagaagccttacaaatgtcatgaatgtgacaaggtcttcaatcaaattgcacaccttgtacgacatcaaaaaattcatactggagagaaaccttacagttgtaataaatgtggcaaggtctttagtcgccattcatatctagcagaacatcaaacggttcatactggtgagaaaccttacaaatgtgaagaatgtggcaaagcattttcagtgcgttccagcctcataacccatcagttaattcacactggaaggaaaccttacaaatgtaaagaatgtgacaaggtctttgggcgcaagtgtttcctgacctctcatcagagaattcatactagagagagaccttatggatgcagtcagtgtggcaagatctttagtcagaaatcagaccttatacgacatcgaaaaactcatactgatgagaagccttacaaatgtaataaatgtggcacagcgtttagagagttttcagaccttactgcccattttctaatccatagtggagagaaaccttatgaatgtaaagaatgtggcaaagtcttcaggtacaagtcttctctaaccagtcatcatagaattcatactggagagaagccttacaaatgtaacagatgtggcaaggtcttcagtcgcagttcaaacctggtatgccatcagaaaattcatacaggagaaaagccttacaaatgtaatcaatgtggcaaggtctttaatcaagcatcataccttacaagacatcaaataattcatactggagagaggccttacagatgtagtaaatgtggcaaagcatttcgagggtgttcaggccttactgcccatcttgcaatccatactgaaaagaaatctcatgagtgtaaagaatgtggcaagatcttcactcagaagtcttccctcaccaatcaccatagaattcacattggagagaaaccttacaaatgcaccctgtgcagtaaggtcttcagtcacaattctgaccttgcacagcatcagagagttcattcatgagagtccctacaaactgtatggcaaaaccatcatcatgagttctagcattaatcaacatcagtgagtccatactaagtggaaatcatataaatgaaatgtatgtgacacaggctttatcaaggcctgccaaatcactggacatcaccacatcactgtggaggatgaaagcacacagatgaattgtgtgtacttgggctattattcaaggaccattgctatagaacacgataggatttacacaagaagtaactctgtctctggttctctgatactaatctatgatattgcatgatgcagaataatgctaagtcaaaatatgttgaatctcatgacctgatgtatatcaaaggtgcaacggcttgtaaatgaccagttttattcaggctataaagcattcaattatttggggcttatagaaaaggctactttactctttgtgacttcgaaatcttttcatgtgccttccatacaggccattcactgtggtccctgggaaagaatcagtaggatgacagggctgacttcattagctgaggattatttctatccaatttcctgatgaaggacattgccttttgagattaaatattgtctgatttagagagcatggaggtgggcagagtaacataaaactgatgaccgtcatcatactgttgcagttagcacactttctcctgacataagtgcacagagcttcagtgtccaccaactgaccatgaaatagagtatgctgtaatcttaaggcataggttattagtgggaagagagtaataggttgctagtgtctgattatatggtagaaataatgcaaggaaaaaggtagccaccttctccattgaacagcagtacctgctgtttagcaaagactgatgagaagtagacttttttttttttggagatagagtctcactctgttgcccaggctggagtgtagtggtgtgttcttggctcactgcaccctccgcctcctgggctcaagcagtccttctgccttagcctcctaagtagctgagactacagacgtgcgccaccacacccagttcatttttgtatttttagtagagacagtgtttaccatgttggccaggcaggtctccaactcctgacctcaagtgatatgttcacctcagcctcccaaagtgctgggattacaggcatgaaccatggtgcccagcctcatttttgaaatggaatagagaacagttatatcacagttgagagtttaatcaaaatgaccggatcagcatattctttttttagatgagacagagtttcgcccttgtcacccaggctgtagtgcggtggcgcgatctcggctcactgcaacctccgcctcccgggttcaagcaattctcctgcctcagcctcccaagtagctgggattacaggcgtgtaccaccatacccagctaatttttgtatttttagtagagatggggtttcaccacgttggccacactggtctcaaactcctgacctcaggcgatccatctgcctcagcctgaaagtgctaggattacaggcgtgagccaccacacctggccagctcagcatattcttaagtaggattcacatttaattcttggtattataagttgcaaccatttgatttagaatgtatgcagctctcatgtttgtagtaataaagtttcatttttcctaagtatgaatgaatcgtgttttctaccgtcataatttcatcccacctcaggaggatggatactctgtagcacacagtaatgcaccattgggattttaagattggagcatccagagcaagttttctggttgtgaaatgaaacatgtcctttggttacatatccttaggtaagtgtgaatatgagtaatcatacttagtacttgaattattgtatctgtgctctgccctagaatgcttctgtgggtacagtgaaagtcccaaagcagtgcaactccagcatcctataccctcaaatgtgtttatagcccttggcaaatgtttagtgtatcattatatttctatgtgcctttttcttgtgtgctaaattagacccatggcacacattctctctttttttttttttttttttttttttgagagtcttgctctgtcacccaggctggagtgcaatggcgcgatcttgactcactgcaacctccacctcctgggttcgagcaattcttctgcctcagcctcccgagtagctgagattacaggcatctgccaccagtcctggctaatttttttgtatttttagtagagacagggtttcaccatgttggccaggctggtctcaaacacccaacctcaggcgatccacccaccttggcctcccaaagtgctgggattataggcttgagccactgtgcctggcccacactttcatttttatgaagcaaaaatacaaatatgacaaatattatgagataaaagtgtgaggataaggttaaaaatagtgtaacacaatctctttttttgtccttgtgctcagtgacataatttgaaattactaatgttcataaatttcctcgtaagggtggacacacagaatggaattgtgttttgctttggtattttaacaaggaacttcacatatttacccccacaacctttgtggtaatttgaacttttgcctactccactagaaccttacaaaaaaagtttttttttttttaaatttgagacagggtctttgttgcacaggctggagtgcagtggcacagttagggctcactgcagcctcaacctccccggctcaagtgatcctcccactttagcctcatgaatagctgtgactacaggcgcacaccaccacacccagctaattttggggtgttttttggtcacagtgttgcccagctggtctccaactcttgggctcaaatgacccacccacctcagcttcccaaagtgctaggattacaggcatgagccatgtacctggcctccactagaacttgtttgacgtccacctaagatttggcttgggtattgagactgatgatgctatgtactgaaggggtctgagaatgtttattacataataagactttctgaggaaagcaggttagacttccccagttggtccaaaaatgtcatgagaaaactgggatagatgactactttgggtgttatgattgttgaagcgtcgggctggggtgtgggtacttacttgtggtttgaactaatacctggtgccaaatgagggagcactcaggctttattatcagttgaccagatgggcatcataatgtagtctcagcaatgcaccaagatgtaacagtctctcatttgagataacactttgggttctttgtcctacctccaagaaaaggagtgtggacataaaagtgagtttggagcgaaagtttaataagcaagaggagaaagctgtctgccagcagagaggggctcctgaacaggagtactcactatgaggtccgtattggggtttttatggactggaaaggggaaggaatgtgcttagtctgcgggctgtcttggagaatgcatgcctcagcttggcccgggacctattagaagctgaagtgaaagcttggcccaggaccaattaggggctgaagtgatgattcatagaagccagacttacagtccaataaaggaacctgaacttattggagcacctgaacttattggagcccactgtgcccatgtccacaaagggagaagaaacttttgcctgggagcccactgactctacaaaggcaaaaggcatttctgtgccaggcctgctcccttatctgagtgagatggaggtctgtgcaagtttttatccaaatgggccttttccatctgtgcagccgtaggcataacaccttgtgctagttcccttatcggtccctgcaccttgaattttttcccaggctgctttttctgttaggtggggatgaggcactgacccatgggccagggactctccagagacccttttcttgctatctacctaaggcaagttaactacctcctttcataggaagaaggaatgcagaggtgtaaaagctgttagtattcagacatcacaaaatgtagtctaactctttagtacaagactaaatacttcttcttgaaactcctgacttcttggttaggaaaaaccccagttttcttcatggtgatagctggttacattcctctcggatggacgtgtaggtttcactgcacctatgattgttgaaaatgcttgtgaattactgtttagtaaagtgtctagtaaaggtgaaggggtgggttgcccctccacacctgtgggtgtttcttgttaggtggaacgagagacttggaaaagaaaaagacacagagacaaagtatagagaaagaaataagggggccccaggggaccagtgttcaccatatggaggatcccgccagcctctgagttcccttagtatttattgatcatttttgggtgtttctcagagagggggatgtggcagggtcataggataatagtggagagaaggtcagcaggtaaacacgtgaacaaaggtctctgcatcatagacaaggtaaagaatcaagtgctgtgctttagatatgcatacacataaacatctcaatgccttacagagcagtattgctgcccgcatgtgccacctccagccctaaggcggttttcccctatctcagtagatggaatatacaatcgggatttataccgagacattccattgcccagggacgggcgggagacagatgccttcctcttgtctcaactgcaaagaggcattccttcctcttttactaatcctcctcagcacagaccctttacgggtgtcgggctgggggacggtcaggtctttcccttcccacgaggccatatttcagactatcacatggggagaaaccttggacaatacctggctttcctaggcagaggtccctgcggccttccgcagtgtttgtgtccctgggtacttgagattagggagtggtgatgactcttaaggagcatgctgccttcaagcatctgtttaacaaagcacatcttgcacagcccttaatccatttaaccctgagtggacacagcacatgtttcagagagcacgggattgggggtaaggtcatagattaacagcatctcaaggcagaagaatttttcttagtacagaacaaaatggagtctcctgtgtctacttctttctacacagaaacaatccgatctctctttcttttccccacaaaagttgcctgagatacgttttatcctagttcaatgaaaattattgtacaaaagtgtttattataaaatcaacatgatttgtttattgtttattgattatataattatatttattatacaataaatatgattttgctagaagagcattttgccaaaagttgtggaaatgtcattgtcagattatggtatgaagcaattttttcaggctgagtgggggtggctcacctgtaatctcagcacttcgggaggccaaggtgggagaaatcacttgagcccagaagttcaagaccagcctgggcaacatagcaagagcttatgtctacaaaaaaattttaaaaatagccgggtgtggtcatgtacacttgtggtcccaactacttaggggcactgcagcaggaggatcgtttgatgccagaaggctgaggctgctgtcgtccttgattgtaccactgcactccggcctggatgacagagggagacactgtgtcaaaaaaaatttactttgtgcttctttatatgagttacattaaaaatcttttataaattgcagtccaggttccatgtctaatacgtttcttccatgtgttacttgagtgaaaatttacgggctacataaatatggctgttgtttggaaagaaaatgttgtgacattagtatgcgcacaagacaatgggaagtacgaactaggattcctgtaaatacgagaaaggaaaagaatgcttttactatgttagaagacttaaaatcacatgaagtgattccagtctttctgttgttattccgatgttttagctattttagattttggggtttggcttttttttgtttcattgcctttctacataattggataaccttgttagtatctgcagaatgccctgattaggaaatgtgttaaccctatgtgtcaatttggtataatttcatattgttttcatattgttttatgtggagtcttccaataaatgtatattgtatatgtgtctgtatttggtgtctttgatttctttcatcaacattttgtagttttaacataatggttctatgaatgttttgtttggcacgtatttctttgacttttttttaagacacagtctcactctgttgcccaggctggagtacagtggtgtgatctcggctcactgcaacctctgtctcctgagttcaagcaattctcctccctcagcctcccaattagctgggattacgggcacgtgccatcactccaggctaatttttgtatttttagtagacatggggtttcaccatgttggccaggctggtctcgaactcctgtcctcaggtgacctgcccgccttggcctcccaaagtgctgggattactggcatgagccaccatgcccagctgaccgatattgttaatggagcaatcatacatggtattttatttttaataccagctttcatgtgtaaagaaatatgctagattattattattattattattattttgaaataacgtcttactctgtcacccaggtatagtgcagtggagcgatgtcagctaagtggaacctctgtcctgcagctttaagtgaccctcccaccccagctgcctgagtagctgagactgcaggtgcgtgccaccacggccagctaattttcgtgttttgtagagacagggttttgccatgttacccatgctggtctcaaactcctgagctcaagcaatccacctgccttggcctttcaaagtgctgggattacagggatgagctgccatgcctggccagtgaaatatacaagattgctgtatgttggccagcgcggcggctcatgcctgtaatcccagcactttgggaggccaaggcgggtggatcacaaggccaggagttcgcgaccatcctggctaacacggtgaaaccccgtctctaccataaatacaaaaagaaattagccgggcgtggtggcgggcgcctgtagtcccagctactctggaggctgaggcaggagaatggcatgagcctgagaggcagagcttgcagtgagccgagatcgtgccactgcactccagcctgggcgacagagtgagactccgtctcaaaaaaaaaaaaaaaagattgctgtatgttgatcttataccttgccacctttacatttcccttgtttagagatttttgtagattttttggaattttctacataaaattatttcaccagattcttattgctaccacacagtgattggcttaaaacaagaaaaatttatttttttacaattctgtaggtcacatatctaatatgggtccacagttctatgattcttcatgaatctccaggcaagaattttttttccttaccctttgtaggttccagaggccacttacatcctttgactcatggtccacttcctccatcttttttctgagatggagtttcgctcttgtgtccctggatggagtgcagtggcacgatcttggctcaccgcaacttccacctccctgattcaagcgattctcttgcctcagcctcacaagtagctgggactacaggcgcgtgccaccacaccgggctaatatttttattatttttagtagagacggggtttcaccgtgttaaccaggatggtcttgatctcttgacgtcgtgatctgctcgcctcggcctcccaaagtactgggattgcagtcatgagccaccacacccggcccacttcctccatctttacaggcgagataaaatctctttatccctctattttcaacacatcacaactgtccgtccctcagggtctacctgcatccttctgatattgaaccttgtgattctatcactttgaccatataattcaggataatgtctatctaaagatccttaactagaccacatttgcaaactcctctttgccacagccagtcacacaggttacagggttgaggatatgagaacatattcagtaacacaggttacggggatgacctgtgcaaccatcatattttctgagagtacactattttttttctcctgtcctcaagccactctccttcctcattgctaccacacggtgattggcttaaaagaacaaaaatctattcttttacaattctgtaggtcatgtatctaatatgggtccacagttctgtgattcttcatgaatctccgaaagtgctgctattacagccctcagataccacatccagcctgtcacttttatttccttttcttcctttatttcactggctggaacttttcacactgtgtggaatagtagtgataaaagtggacttccttgcctcatcccctacccctgggggaatctttatgtctttcaccagaatgtatgatgatcctttttaaattggtgggtgatcttgagttgaggaagtgtccaatgacactgttttccataccatctgcagtcttgtttttctgaaaaattactttttttattggcaactgtcaaaagagatattctcaagacttggaacaagggcagaaacccctagacagatggttttttcttttcttttctttttttcttttttgtttttttgagagagagtctcgctcttgttgctcaggctggagtgcaatggtgcagtcttggctcaccgcaacctctgcctccccggttcaagcgattctcctgcgtcagcctcccaagtagctgggattacaggcatgtgccaccacacccagctaattttttatttttagtaggcggggtttctccatgttggtcaggctgctcccaaactcctgacctcaggtgatccacccacctcagcctcccaaagtgctggattacaggcatgagccactgcacccggcgttttttttttttttttttttttttgttgttgttgtttttaattcatcaggctggagcagtgtttaaaccaatctggagttaccattccagctatggccacaacctgatctctacatcttggccttcttcacattggctggaagctggctcacttcacccaagggcgtagtttgacggcattcatgctttccacaagtttgagcatccctcgctcctggcactggcagtgccactcagccatggactggggcatccacttggtctggcacttgtataaatagaagccgtaaccgacaacctcggtgaggtctgaagactccagagccttcagcacgagcatgaccttgctcacctgctcgatgtaagggatttgagatcagtctgggccaaacatggcttccagcagctgcatctggacctggagcacctctggatctttcaggaagtttcacccatggtgggatatttctacatctgggattgttcccaacttgtaaccctcacaaccaaaactatgctcccgcatgagccgggcctaagcgttcatcagtatttttgattcccaccaaatgtatgaagattacaatttcttcacagccttacttgtgaagcaggttcactgcacactggttaccaacgtgttggagttgagtgagagatagtcccatgaacacacagtaagttacatgaagtgaatttgttacagattggcagcaacgacagcagatgcctggggttcatgcatgctgttcccgaaggctcaggaaaaccacccagttcagatgcagtctgcgtgtgtgttcctcccgcatcacagctgagggagcctgaaaggcggcctggcccaggtttcatgctccagggatgcatggcacgttggcctaaaacaatgaagggcatcctgttctgaggggactggaacagatcctgtccttctctggtaaggatggacaggatcctgtccttctctggtaaggatggacaggatcctgtccttcatctcagtatgttgcttttctagcacattttatattcattcttgggaactacaagtgagaagtcagacgcaactgggccagttcaaccccacttgagtgctgtcttgcagtctccccaccaacccagtatcccctttaataaagctagtcaatttatgtgtgcactgaccttcctggatctggaggtagaggcttgtctcaggagattgaagtaatatcttgactggcagaatctcagcgcgacatcactgaggtacagccagttgcatttcactaggctcaagaggattgctgcctcaagcaggataaccaggcctgcctggaacagtgccatagtccgggatcccagtgacctgggtgagaagttgctattcaggtcaaagaaaatttcttcaggtgaccccactgtctctagccaatagtcctgcttgtggatcttacgtatttgtgtttcaaaactacctgaggtcctgatgtggggtccttacctcctgtgcacagtgactcatgcctgtaatttgagtactttgggagtgtagacagaaggaaaacttgaggccagaacttggacacccggctgggcaacaaagtgagactccatctctacaaagtaataataatatataaaactaaaaaattagcacagtccaatgtcacaggcctgtacttccagctactcgggagactgaggtaggaggtgcccatgaccccaggaagtcaaggttgtagtgagctatgattgtgccactgcactccagcctggatgtcacaggttgattccctgtctttaaaaaaaaaaaaaaagtcttaaactaaataatttatacctatttttaaagttattggcttttttaaaaagagttggtgacctgacttcacactgaccttagtcctctatgcccaaggtggtgtccctaggaaagtttctggaattgagcacagggttgacctcaccctctggagtgaatggggaatgtaaatgaaaagtatttctagccgggcgcggtggctcacgcctgtaatcccagcacttagggaggctgaggcgggcggatcatgaggtcgggagatcgagactacggtgaaacccagtctctactaaaaatacaaaaaaaattagccaggcatggtggcgggtgcctgtagtaccagctactcgggaggctgaggcaggagaatggtgtgaacccgggaggcgaagcttgcggtgagccgagattgtgccactgcactccagcctggacgacagagcaagactccatctcaaaaaaaaaaaaaaaagtatttctattctatggggcattggcatgatactgcgcattccactctggcagggtttagcatttcacactttagcttccatccccttcacagatagttccaaagtgtcttaattcctaaaatttgtctttctggctgggcatagtggctcacgcctgtaatcccaacactctgggaggccgaggcgggcagatcacctgaggtcagaagttcaagaccagcctggccatggtgaaaccccgtctctactaaaaatacaacaaattagtcgggtgtggtggtgcgcacctgtaatcccagctactcgggaggctgaggcaggagaatcacttgaacctgggaggcataggttgcagtgagccgagatctcatcattgagcttcagcctgggcaacgagcgaaactctcaaacaaacaaacaaacaaaaaaaatgtctttctttcgttctttcttgtctctccctttttctcacacacaggcacagacacctacattcttttctttgttgcactatttctctctagtcttattttctttctttcttttcttttttttttttttttttgagacggagtctcactccatcgccaggctggagtgtagtggtacgatttcggctcactgcaaccctgcctcccgggttcaagtgattctcctgcctcagcctcccgagtagctgggactacaggcgcccaccaccacacccagctaatttttgtgtttttagtagagacgggggtttcatcatgttggccaggatggtctcgatctcctgacctcgtgatccgcccggcttggcctcccaaagtgctgggattacaggagtgagccaccgcacccggccttgtctttctttttgctttcttttcacgctctcttctctctctgcttccagagtagttgggacttaaaatttattgtaataacaggaattctcgtggatctaatctaatcaccaaccgattttgctctgccccagcaagatctgtttacagatctgtttacagaagtgctgagcagatctcgcctccaaaaccctaaaacaggatcgctgagtcagactgacagaagcatagaccccgccttgagcccgccctgtcccggccctgccctcggccccgggcccggcctgtacgatgcgcgcgcaatttcctgcagacccggaagtcgagatcatggagtgaacgtttcgcgcgctttttcctgtagacccggcacccgactgcgcggaaagactgtctaagccgccactcgtgagtttgcctttgtctagattaaatttaggctgcccagttcctgtgtgcttctacacccgcgatctgagggctcatgcagaccttgaagtcccggcaccgctctatccactccaagtaaattcagacattctctagagagtctggaggtcgcttacctgcgtgttaaaaccgcttggaggcttctaggccgggcgcggtgcctcacgcctgtaatcctggcactttgctatttttttttcattttttgtaattattcagtctagttgattgaatccattgatgtgtaccccagagataccaagggctgactttagactgtatctgctcgttagtcacttaatagtctttttttttttttttttcctgagactgagttttgctcttgttgcccaggctggagtgcaatggcgtgatctcggctcactgcaaactccgcctcccggattcaagcgattctcccgcctgggcctcccgagtagctgggattacaggcatacgccaccatgcctctctaattttgtatttttagtagagatggggtttcaccatgttggccaggctggtctcgaactcctgacctcaggtgatctgcccgcctcatcctttcaaagtgctgggattacaggcatgagccaccgtacttggccaatagtcttttggatgagatccacttttatggtatctcagtgcttttttttcatgtaacccttttttttttcccttaacaatgccctccaggcacatgagtattgattgatgctgacaattttttttttgggtttttttgagacagagtctcactctgacgccaaggctggagtgcagtggcactgtgttggctgactgcaacctctgtctcctgggttcaagcaattctcctgcctcagtctcccgagtagctgggattacaggtgtccaccaccacggccggctagtttttatatttttagtacagacagggtttgaccatgttggccaggctggtcttgaactcctgacctcaggtgatccacctgcctcggcctcccaaagtgctgggattacaggcgtgagccactgcgcccggccttgatgctgacaatttggatatgccagtgagaagctgtaacatggagtctttaaggggaattaatagggtttagtactgatggaggtttcaggcatccattggggctcttggaacatagtgcacatcgataaaaggattctactatagtctatatctagaattgagcactgtgatccacagagggctgaggggcctgtgctctgcatgagctttggtcagggtgaggtctgtgctttttttttgtttttttttgagatagagtcgcactctgtcacccaggctggagtgcagtgttaaaatcttggctcactgcaacctctgtctcctgggttcaagcaattctcctgcctcagcctcctaagagctgggattataggtgcctgccattacccagctaaattttgtatttttaggagagacggggtttcaccatcttggccaggctgatcttgaactcctgacctcgtgatcgacctgccttggcctctcaaagtgctgggattacaggcgtgaaccaccacacatggccttttttttttctttttcttttttaagatggagtttcaccctgtcacccaggctggagtgcaatggtgcgatctcggctcactgcaacctctgcctcccaagttcaagggattctcctgcctcagcttcctgagtagctgggattacaggcccgtgtcaccacgcccagctaattttttgtatccttagtagagacgagggtttcattatgttggccaggctggtctcaaactcctgacctcatgatctgcccacctcggcctcccaaagtgctaggattataggtgggagccaccgcacccggccaagtctgtgcttttaaggggagcttagtcaagcccagctctgcactgctgcagtgtgtgtgtcgctcaccatgagacaggagagagttttgaggaagggagtaaaaaactcacttgttgattttcctgtgggagatcaacagtaggcagcagaggaccatccttccagaaggtgaagtcttccctttttgtgtggctgtggcacaggaagtgggtgtgttgattctaagccctaaacagcattatttttgatactaggattcactttcaaagagacatattatgcaaggaagcaactcggaagaggaaagaaaggaagtcaggaatggcccttactcaggtaaggtaatgttctcagtggattgttctgtctctgtttcttcctgaaatgccaggcattggagttgctaatctctgactctgaagcatcctgcctgactcatttcattgcacttacccatggcttcttccagtccctttcacttccacttaagattccagttccctatgacccaatgacatgaacttgggaagaggttccactgggcatggtcctgggaagtgctcacacccagacacggatggagatggggtgtgggccttgtggtgtcagtgctgttgggcagcagggattgttcaggggccacatctggatgcactgtgagtgttctgtggactaagactagagaagctgcatgtggaattcctttttttttttttttgagacagagtctcgcactgttgcccaggctggagtgtggttttgtgatctcggccatataaatgtatatgtgtactagtgtatatgagtgttagtatatatatgtgtaagtgtgtacatgtgatgtgtttgcatgagtgcacagatgagcaaacctatagtttttataaatagcatgtcatcattatatatatatatatttttatcagttgaaattacatctatttatcaggatgttcaaatttttctacattatcatgtatgatgatatgaggcatcatacctgatagtggctataagaggcaatgaggcaatggctataagaacattatagtaatgtattatggggatatcgattatatatatgcatatataatgaactattaggcaattccatgtttttaatccttgaagttgttttaaatttactgaattaggtaactgtcaatttacttttgatgctgatctgttacttaactgtctgattctttaggtttgattctcatgctcagacacctgtgatctgctgcttactctgctgtttcagttctcacacctggggcaagctagcgtgtatgtgaaagagttgtctttttagtaagataggagcagattattctttcattggcttttgttgctgtaccagttagttcatgtaaatcattgagaatagtgcctatcacatgggaagtgttctattcagccattgctgttgttatcatcgcagttttcagattttcaccattttttatttattttatttatttatttattttttttgagacagggtctcgccctgtcacccaggctggagtgcaatgatgcaatctcggctcactgcaacctctgcctcctggcttcaagccattctcctgcctcagcctcctgagtagctgggattacaggtgcacacctccatgcccagctcattttttgtatttagtagagatggggtttcaccatgttagccagtctggtctcgaactccttacctcatgatccacctgcctcggcctcccaaagtgctgggattacaggtgtgagccactgcgcccggcccagattttgaccatttttaaaaaccactataggtcggatgtggtagctcatgcctgtaatcccagcatttttggaggctgaggtgggaggatcacttgagcttaggcctttgagacaagcttggacaatgtggtgagactctatctctacaaaacatacaaaaattagctgggcatagtggtgtgagcctgtagtcccagctactcgggaggcttaagaggatcacttgagcctgggaggcagaggttgcagtgggtggatatcacacccctgcactccagtctgggaaacagtaagatcctatctcaaaaaaaaaaaaaaaaaaaaaaaagaaagaaagcactgtagacattgtcatctctgaagacactacttgtatctcaggtagatactaaatgtcacttgatgtgtcaaaaataaaacctaacatttctttctctttttgggggggggaggggacggagtctcactctgtcacccaggctggagtgcagtggcgcaatctcagctcactgcaatgtcccactcctgggttcacaccattctcctgcctcagcctcctgagtagctgggactacagacccccaccaccgcgcctggctaattttttgtatttttagtagagatggggtttcaccgtgttggccaagatggtcttgatctcctgacctcgtgatccgaccgccttggcctcccaaaatgctgggattacaggcatgagccgccgtgcccggcagtaatacctaacatttctatacagataaccctggtttaattttttgtttgtattgcttgtattatccacaaaatgagacatctactctgatttaaagaatgtcatcactccttatggaaaagtataataaaacacaatcacagacacataactagctcaagaatcctttaatgtggatttggcgcagtgctcgcttcagtggagtgagtccttacaactgtcttctcattctgtttgaagataagtactctctccataccctgtttttgaaatgtggatttccttttaggggcaattgtcattcagcgatgtggccatagaattctctcaggaggagtggaaatgcctggaccctgggcagaaagctttatacagggacgtgatgttagagaactacaggaacctggtctccctaggtgaggataatgtccgtccagaagcctgcatctgctctggtatatctttttgcattttctcttgtgtgtctctcgggagcccctgcattgcttgactgagattgaaacctgttgactaagaaatgaaaagcaggccaggcgcagtggctcacgcctgtaatcccagcactttgggaggccgaggcaaatggttcacgaggtcaggagatcgagaccacggtgaaaccccatctctactaaagatacaaaaaagggtgcctgtagtcccagctactcgggaggctgagacaggagaatggcgtgaacccgggaggcggagcttgcagtgagccaagatcgcaccactgcactccagcctgggtgacagatcaagactccgtctcaaaaaaaaaaaaaaaaaaaaaagaaatgaaaagcattatgctttctgaacttgaaatgtccccttacaccagcctgaccaacctggtgaaaccccatccatactaaaaatacaaagattagttaggcatggtggtacatgcctgtagtcccagctactcgggagactgaggcaggagaatcacttgaacctgggaggcaggggctgcagtgagctgagatcatgccactgcactcaagcctgggcaacagagtgagactctgtctcaaaaaaaaaaaaaaagaaagaaatgtcccctttcttcagatattctgcttccttcatgattcatcattgatggcaccagggctgaagtgtgcatgaaaccttatgacagacttaaaaaatatccagttccctgttttctacccatgtgcttttgattcagtagttcttgaaagggggcttgacgtctacatgttacaatgttcccttagcattcagaaggatgcaatcagtggttgaatttgtgaaatattattcttgattaatttgtaatatgctgtctcctacctaaatatagggcttggactttggagatgccacagcacacatttattctttctttttgtaagtaggaatctgtcttcctgacctgagtgttacctccatgttggagcaaaagagagatccctggactctgcagagtgaagtgaaaataataaacaatccagatggcagggagtgcatcaaaggtgtgaacacaggtgagagctcaggtgggcagagtggaggccccataatttttgtattttgagaagggtctcactctgtcatccaggctggagtacagtggcaatcatagctcacagcagccttaaactcctggacttaagggatccttctggcttggtcttccaaagtgttgggattacaggcttgagccactatactctgcagagccacactattacatagtgtttgggaaactctgcaagtgggtgaattctgtgggaaaaccaaagctgaaatcctttgagttgtgaacagacatttttcattttcttttttctgttttgagatagcgtctctctcctgtcacccaggctggagtgcagtggcatgattatggctggctgcagcctcaccttctggggctcacgtgattctcccacctcagccttctgaatagctgggactctgtgtgtacaccaccatgcctatctagttttttgtatttttagtagagatggagtattgccatattacccaggctgtacttgaactcctgacctcaagtgatccacccacctcagcctcccaaagtgctgggattacaggcatgagccactgtgcccagcctcacataatgatttttgagttctaattaactttctcagttcttctttatctaggaaagcctgaattatttttgtagatgagttttactaaatatagtattcttcattgatgtttttcttatttttcttcttcttctttttttttttttttttgagaccgtctcactctgtcacccaggctggagtacagtggcatgatcttggctcactgcaagctctgcctcctgggttcacgccattcttctgcttcaacctcccaagtagctgggactacaggctcccgccaccatgcctggctaattttttttgtatttttagtagagacggggtttcaccgtgttagccaggatgttctcaatctcctgacctcatgatccacacacctcagcctcccaaagttctgggattacaagcatgagtcaccgtgcccggcccttatttttctttaagcactttcagtatcacttcactgccttctaccctgaagatacctgctggaaaaatacacatagacttatacagtttcctattatatgtcaagtctctttttttgttgatgctatcaaactttgtctctgtctctctttgacttttgataatttccttatattatgtccctgtgtgaatgtctttgggctaattttagtaatggtcaagcttcttgaatttgtatattcagttctttcctcagatgtgtgatgttttaacattatttcttcagttgtggcttttcatcctttgtcatcttcatatgaacctccaatagtttgtatattgttccaccttatagtctctcaaaaatgtattagggtttgtaaggttttcttcatcatgttttctttgtggtctttggaactgatacttttgaataacttatctttcagtttgctcattgttttcctttccttttgctgtctgctgttaaaccccctaatggatttttacatcagttactgtatttcagctccagaatttctgttctcttgtttttaatgatttcccctgtgtttgttatcctcattcttttcacatactgtttttctgattttatttagttttctatttctgttatcttttagtttggtgtctggagttttatttatttatttatttgttattcttctagccatattttctcatcttttcataggccttgtatggtagtttttggtttaggtttggtaaaacaaccacttttttcagttattttttataatgcgcagtgggagaccttagttgctgtaagggtgtgggaacactccattcttttctgggatgtatctttcctgactttgtgaaagtactattacaaatatctacattgctgctcttaaatatcttattttccttaagaggcttatccctgctttttcacagaagctgttagttactcttgtatttgtcagcttataatctctctcaagctttcccttaattcccctgactcctgcagattccagattcttcagtaaatcacctcactcccttgtgttttctgcattaccaacatgttatacaaagtatgctgatactggccaggcacagtggctcatgcctgtattcccagcgctttgggcggctgaggcaggtggatcacaaggtcaggagtttgagaccagcctggccaacatagtgaaaccccgtctctactaaaaataaaaaaagttagccaggcatggtggcaggcacctgtaatcctagctacttgggagggagaattgcttaaacccaggaggcagaggtagtagtgaactgcaatcacaccattgcactccagcctgggtgacaatgtgagactccatctcaataaaaacaaagtatgctgataatttcaatgtctgagtgaagtgatgcagaatcttgttttctgtcagactttaaacatgccagaatcgggattaagttctaaaattttcttgcttttctagagaagagttctaaattgggaagcagtgcaggaaacaagtcacttaaaaatcaacatggattaactcttcagttacatctgactgaatggcagccatttcaagctgtaaggaatatttatggatgtaagcatgttgagaaatctatcagtgacaattcttcagtttcaccagttcaaataagttttttcagtgtcaaaacccatatttttaataactacagaaatgattttcttttttctacattactcccacaagaacagaaagtacacattagggaaaagccttatggatgtaatgagcatgggaaagtcttcagagtgtcttcaagccttactaaccgtcaagtaatccacattgcagataaaacttacaaatgtagtgactgtggcgagatctttagtagcaattcaaactttgcacaacatcaacgaatccatactggagagaagccttacaaatataatgaatgtggcaaagtcttcaatcagaattcacaccttgcacaacatcagaaaattcatactggacagaaaccttacaataacaaagaatgtgggaaagtctttagtcaccatgcctaccttgcacagcataggaaaattcatactggagagaagccttacaaatgtagtgaatgtggcaaagcatttagtgtgtgttccagtcttactgctcatcttgtaatccatactggagagaaaccttatgattgtaaggaatgtggcaaggtcttcaggcataagtcttccctaaccactcatcagacagttcatactggagagagaccatacaaatgtaatgaatgtggcaaggggtttagtcgaattgcattccttgcaaggcatcggaaagttcatactggagagaaaccttacaaatgtaatgagtgtggcaaggtctttattggcaattcacgccttgcacgacataggaaaattcatactggggggaggcgttacaaatgtaatgaatgtggcaaagcatttagaacgtgttcagatctcactgcccatcttctaatccatactggagagaaaccttacgaatgtatagactgtggcaaggtcttcaggcacaagtcttccctaacctatcactgtagaattcatactggagagaagccttacaaatgtaacgaatgtggcaaggtcttcagtcagaattcaaaccttcaacgacataggaaaattcatactggagagaagctttacaaatgtaatgaatgtggcaaggtcttccgtcagaattcacaccttgcacaacatagggatattcatactggagagaagccttacagttgtaatgaatgtggcaaggtcttccgtcggaattcacaccttgtgcgacataggaatgttcatactggagaaaagccttacagttgtaatgaatgtggcaaggtcttcagtcggaattcacaccttgcgcgacataggaatattcatactggagagaagcctcacagttgtaatgaatgtggcaaggtcttcagtcggaattcacaccttgcgcgacataggaaaattcatactggagagaagctttacaaatgtaatgaatgtagcaaggtcttcagtcggaattcacgccttgcacaacataggaatattcatactggagtgaagccttacagttgtaatgaatgtggcaaggtctttagtaaaaattccatcctagtacaacattgcagtattcataccagagagaagccttaaaaatttagtgaagctggcagggcgcagtggctcacgtctgtaatcccagcactttgggagtccgaggcaggtggatcatgaggtcaggagattgagaccatcctggctaacacggtgaaaccccatctctactaaaaatacaaaaaaaaaaaaaaaaaaaaaattagctgggtgtggtggcaggcacctgtagtcccagctactcaggaggctgaggcaggaggatggcatgaacctgggaggcagagcctccagtgagccgagtgagccactgcactccagcctaggtgacagagtgaaactccatctcaaaaaaagaaaaaaaaaaaatgagtgaagctgccaagcatggtggctcacgcctttaatcccagtactttgggaggccaaggtggccagatcacctgaggttagaagttcgagaccagcctgaccaacatggagaaaccccatctctactaaaaatacaaaattagctgactgaggtggcaggcacttgtgatcccagctactcaggaggctgaggcaggagaattgcttgaacctgggaggcagaggttgtgatgagccgagattgcaacattgcactccagcttgggcaagaggagcaaaactctttctttaaaaacaaaacaaaaaaagttatgaagcctcacaaaagtaataaatatggcaaagaatttcatatgaaatcatgcctctctacccatctattaatccatactggaaggaaaccatagaaatataaagaatacaagaaggtcttcaggcacatgttttccctaacctctcatcaagagaattcacactggtgattgactttaaacatataacaagtgtggcaacgtattcacttaaaatacacaccttgtaaactatcacagaatccatactggagagaaaccttacaaatgaatgacagcatcttcaaataaaatgcacatctggcacaacattggaaaattcatactgtagataccttttaaatgtagcaaatatggcaaagtcaaagtcacaattcacatcttgcacatcaaataattcatactggaggctgggtgcggtggctcacgcctgtaatcccagcactttgggaggctgaggcagacggatcagttgaggtcaggagtttgagaccagcctgaccaatgtgttgaaaccccatcactactaaaaataaaaaaaatagctgggtgtggtggtgggtgtctgtaatcccagctactcaggaggctgaggcaggagaatcacttaaacccaggagatggaggttgcagtgagccaagaatgcgctactacactccagcctgtgtgacagtgagattctgtctcaaaaaaaaaaaaaagaattcatactggaaggaagcgttacaaatgtaatgaatgcggcagagcattgagaaggtgttcaggtcttaactgttcattttgtaatccatagtggagataagtcttttttttttttttcccccgaaacaagagtctcgctctgatgcccaggctggagtgcagtggtgtaatctcagctcactgcaaccgccacctcctaggttcaagcaattctcctgcctctacctcccgagtagctaggactacaagcacatgatgccatcatgcctggctaattttttgtatttttagtagagacggggtttcaccatgttagccaggctggtctcgatctcctgaccttgtgatccatctgccttggcctcccaaagtgctgggattacaggcatgagctgctgcacccagcttgagaaatcatatgaatatatggaatgtactccaggcatggtggctcacacctataatcccagccctttgggaggccaaggtgagaggattgcttgaacccaggagtttgagaccaacctgggtaacataaggacaactccatctctacaaataataaaaaattagccaggtgtgttggtatatgcatgtattcccagctacttgggaggctgaggcagaaggatcatttgagcctaggagcttgaggctgcagtgagtcatgtttgcagtactgcactccagcctgggtgacagagtgagaccctatctacaaatataaacaaacaatgtgaaacgtcttcagtcacaagtattccctaacaaatcactatagaattcatactgcagagaagccttacaaatgcagcgaatgtgacaaagcatttagataatgttcaggctttactgcccatcttgtaatccatactgcagacaaaccttacaactgtaatgaatgtggcaaggtctcaaattgaaattcacatcttgcgaatcaccacatagagagaaaccttacaaatacaaatcaccacatagagagaaaccttacaaatacaaatcaccacataatggagagaaaccttacaaatgcaacatatgtggtaaaatgttttagtcacaattcacaccttggacagcatcagataatttattcatgaaagagtccttacaagctgtgtacggaaagctcgtcatgagttttagcattaatgaacatcagaggttccatactaaggagaaatcatataaatgtaatgtatgtggcacaggctttcctgaggcctgccaaatcactagaaatcaaaatatacttttggataaaacgacacagatggattgtatatgctgaggatatccaaggaccattactatagaacatgaaaaggatttaattattgttttcttttttcctaaaagtgttgggaacaggccaccaaaactggccataaacaaaatctctgtaggactgtgacatgttcttgatgggcatgacacccatgctgaaggtcgttggtttaccagaatgatggcaaagaacacctggcccacccagggcagaaaaaccgcttaaggcgttccagaaccacaaataatagcatgtgcattctgtgccttaaggacatgttcatgctgcagataactaaccagagcccatccctttgtttcccataaggaatgcttttatgtaatctataatcaatagaaacaatgcttatcactggcttgctctcaataaatatgtgggtcaaactctgttcatggctctcagctctgaaggctgtcagtcccctgattttccactccacactatatttctgtgtgtgtgtctttaattcctctagcaccgctgggttagggtccccatgactgagctggtctcagcagaaagctactttcctctttataactttcaacctgaactttgagatcttgacatatacctcctcctacaggcctttcactgtggtctctgggaaagaatcaagtgaaagaatcaataggatgacagggctgatttcattagctgaggatcacttctattcagcttcctggaagaagaacactgtctttttatattaaatattgtctgatttagacagcatggacatgggtagagaataacataaaatgatgactgcttgaagcagtcacgcttattcttttcttgagtactgcccactcttttcttgacaaggatgcagtacttctgtgctctaataaataactgtaaaatagagcatgccattaaaggcatggcatttttatgggaagagaataattgttgttaggtattgattacgtggtagcaatcatggaggggaaggggtggtcacctcctcaattgaatagcaatagttcctgtttagcaaagatggaaaacagtagtcttatttttgaaatggaagagaaaacatgcattttctcttaagtctgagcacacagaatgggaatgttgttaattttcgataacctgatgacagtgtgcctaggtgattatctttttgcgatgaatttctcatgtattctttgagcttcttatgtttggatgtctaggtctctagcaagcctgggaaagttttcctcagttattaccctaaatatgttttctaaacttttagatttctcatcttcctcaggaatgccaattattcttaggtttcatcgtttaacataatccgagacttcttggagactttgttcatattttcttattttttctttgtctttgttggattgagttaattcagaaacctcatcttacgttgggaggctgaggtgggcatatcaccaggtcaggagttcaagaccagcctggccaatatggcgaaaccccatctatactaaaaatacaaaaattagttgggcatggtggtgagtgcctatagccccagctactcaggaggctgaggcagaagaattgcttgaacctgggaggcagaggttgcagtgagccgagattgcgccattgcactccagcctgggtgatgtagtgagactccatctcaaaaacaaacaaaaaaaatcaccttgtctttgagctctgaaattctttcttctgcttgtttaattctattgctgagactttccagagcatattgcatttctgtaagtgcatccattgtttcctgaggtttttgttttttatttatgctatttatttaactgaaatttctcccctcatttattgtatcattttatttctctagtgcctccttgattagcttaataactgaccttctgaattatttttcaggtaaatcagggatttcttcttggtttgtatccattgctagtgagctactgtgattttttgggggatgttagaaaaccttgttttgttatattaccagagttagctttctggttccttctcatttgggtaggctgtcagagggcaggtctagggcttaaggatgttgttcagattcttgtcccatggggtattcccttgatgtagtactctcccccttttcctagggatgtggcttcctgagagctgagctgtagtgattgttatctcccatctggatgatctagccacccagcaggtctgccaggctccaggctggtactgggggttgtctgcacagagtcctgtgatacgaactgtctatgagtctctcagctgtggacaccaggacctgctccagtgtaggtggcagggggacgaaatggaatctgtgagggtcctgagttttggttgtttaaagtactatttttgtgctggttggcctcctgctaggaggtggtgctttcaagagagcatcagctgtggtagtatggggaggattaggtgggggcagggcactagaactcccaagagtatatgccctttgtcttcagttaccagggtgggtaaggaaggaccatcagttgggggcagggctaggtgtgtctgagctcagactctccttggcaggtcttggtactgctgctgtgggggatggggttgtggttcccaggtcaatggagttatgtttctaagaggattatggctgcctctgcagtgtcatgcagattgtcagggaagtgagggaaagccggtagtcataggcctcacccagctcctgtacaacccaaaaggccagtctcactcccaccgtgcccccatgtcccaacagcaggaagtctgtttccaggcagtgggcaagcagggctgagaacttgccccaggctaccagcctcccaactacaaaagcaagtaaggctttcgtgcctcccagcctgtggagtctgcacactggattcacgctcttccatgagttttggccaggagacttctcattcagttggaattgttacaaagttcaactggaggtttccttctccctgtggccttttcccagtgcctcttgcagccttcccccaggacccctgtgaggcaaggcagaaaatggcttgctaggggacccagagagcttttcccgctacccttgtttttcactcagctaatttttttttttttttttgagacagagtcttgctctgtcacccaggctggagtgcagtggtgcagtctccgatcactgcaacctccaactccagtgctcaagcgattctcctgcctcatcctcctgactagctgggattacaagcacatgccaccatgcctggctaatttttgtattttttgtagagacggggtttcaccatgttggccaggctggtctcgaactcctgacctcaagtgatccacctgcctcagcctcccaagatgctgggattataggtgtgagccatagcacccagcctcagttctctaaattgactgagttccaggtaaggtcagaatcttctcccatgatctagaccttcaggtttgccagtgacggtttgtgttcttggcagacaatcttcctttcccacttacacagtttgggcactcacagtatttggggtgtctcctgggtcctgcgggagcaagagcaaccaacttccttcagaggtcctgtgggttttcttggcttcctaatttactcttgcagtcattctggagcaaaaattcatgatgcaggactccacacactactgtccatctgagtggaagctgcaagttagtcctgccctgccatctgccatgatcctctgaaaacaagaatttttcttatatttttccttccacacattgtaatccttattatatgtataatttccatttcttacctgtgttactcctctgaaaaacacagggaatatataaatgaaagttttcttttgagacaaaattttgtgacatgaaaatgcacataacacaataactgatatgaactaggttctgtataattatgaaaaagaagtgttcctttaaatctttaattcaatggaggtaccaagttgatataagatggtcaactaaaatctcttaatgtgggtgcttgctctcttcaggtgcttgaaatcaagtgtgtctccagcatttgttgaagtaaatgaaaatataatgataaataacagaaaaagtcatcccccaccacatgccaattacagtttgtgacaaggagattatctccatgctcaatctcaaggccattctgcctcttctcactggatgatattcctattcccaccagaggatattacagggaaacatgacattagtgccactattaccatggaaactgacacccaacattctcccttcagatttgtccccacctaaaaaagagatttttgtatgtcaacggtgcatcctgagaccctgaaatttcactcactctagagattttttatactttttgggcttttctacatacatcattttattggttccctattgctgctataacaaattaccataaagtgagtgctttaaaaaaaatcccacaaatttggctgagtgtggtggctcgtgcctgtaaccccagcactttgggaggctgaagcaggagaatcatttgagctcaggccttcaagaccagcctgggcaacatagcaagacctcatctctactaaaaattataaaattagctgactgtagtagtacatgcctgatgtctcagctattcaggtggctgaggtgggaggatcgcttgagcaagggagatggaggctgcagtgagctatgattgcaccattgtactccagactgggtgacagagcaagatcctgtctcacacacagacgtacaatttattgtcttatagttctggatgtcagaagcctaatatagatctgcaatgctgtgattgttcttcaatcttgaggaaagaatttgttttctaacccttccttggttgcagagactgcatctctccttgccacatggtccacttcctccaccttcaatgtcagttgcagatcatcttatatctttatctctgtcctgatgttttcaccatatcaccaactactaagtgactctaactccacctgcatctttcttatactgacccttgtgatgatatcacctttataagaaaaaccaggacaaaatgtcatctcaagatccttaactagatgacatttgtgaaccctcttttgacacataaagtaacccagatcatgttgatcaggacatggacatcatttgggagaacattattcatcctattataactaatatattctgttaatggctatactattttatcctcctttctggtctcttacatttgtttttatttctttatttcactgggtacaatttctaatggtatggcaaaaagagtggacatacttgtttcattctcaacctctgtgttgaagcattcagttttgttttttgtttttctttttgttttaacactaacagtgacattttccctaaggtatgtaggtgttcttcaggaagatgaaaaagttttgctctattatcagttttgaaagtcagaccatagacaagtgttgaattttgttgtgtttttttctgcctctattgatagagtcctatgattttttaaatctttttatcatgttaatatcgtggattacattgatcaaattttatttttttcttctcataacgcagtgtagtagacagaacactgattgaattttaaatgattaaacagccttccatcctcaaataaaccccattaaatcatggagtacaaatctttttatatattgttgatttctattgctaatattttcttaagaattttgcgatttttttcatgtgaaatttagtttttagacttttttttttttctaattcctttgcctagttttggcaaaccataataatggtttcataaattaagttgggaagtagtccctcctcttctgccttctgggacaaattgtatataattgctgttaatacttctttacaggtttaatagaattgtttagggttaggctgagatgggaggatttcttaaggctaggagtttgagactagtctgagcaacatagcgtgacctcatctctaaaaagaaaaattttttggccaggcgcagtggctcacacctgtaatcccagcactttggaaggccgaggtgggctgatcacttgaggtcaggatttgaaaccagcctggtcaacatggtgaaaccccatctctactaaaaatacaaaacaattagcctgtaatcccagctacttgggaggctgaggcaggagaagtgcttgaacctaggagttggaggttgcagtgagccaagatcacaccactgcactccagcctgggcaatagagcaagactccgtctcaaaaaaaaaaaattattttttaaaattagcccggcatggtgttccatctacttgtgaatgtgaggctgagttgagtagacttattaagcccagcagtttgaggatacagtgagctatgattgtgccactgagctccaacctggatgacagagtgagacctcatctctacaaaaataaaaacaattgtctagtgttaccatctgtgcctgaaaattgcattatttgggcattatttgggagaatgttttatataatcaggtaagaacacaacgtgagctctagtctcttaactttttaagtgtacaattcagtagtgttattcaaccttaaaatcattcttttaacattttcaatggtatttatttatatggtacatgtgatattttgatacacacataaaatagataatgatcaaatcaggataatttaaatatccatcacctcaaacatttatttctttctcttgacgacctttcaactcttctagctactttgaaatatacaataaattattgttcactatagtcaccctactatgttactggagatgacaacttattccttctggttttttttggtacccattaacctacttcttttcatgcctgtgctaacctccccactctctggtaatgagcattctactctctacctccatgagattaacttttttagctcccacatacgagtgagagtatgagataattgtcttttctgtacgtggtttattttatttaacataatgacctccactttgacccatgttgctgccgcaaatgacaagattttattctttttaaaggatgaacagtataccattgtctatatatacattttctttatccatttgttcgtgatgaaaatgtaagttgatcccatatcttggctattgagaacagtgctacagtaaacatgggtgtgcagatatcactttgatatccggatttccatcctcattctctctctctctctctctctctttctctctttccaacagtggaattgctggatcatatggtagttctgtttgtagtttattgaagaacatccatactattttccataatggctatactaatttgcattctcaccaaccagtgtactagcattttcttcctttgcatattcaccagcatttgttatttttttttgtatttttgatgatagccattctaactgagatgacattatatctcactgtggttttgatttgcatttacctgatgattagtgatgttgagcattttttcataggcctgttggtcgtttgtatgtctccttttgagaaatgtcttttcagatagttggtccattttttaattggctttaaaaatttgtttgtggccaggtgtggtggctcacacctgtaatcccagcactttgggaggctgaagcaggtggatcacgaggtcaggagttgaagcctagcctggccaaggtggtgaaacgctgtctctactaaaaatacaaaagttagccaggcgtggtggtgtgtgcttgtaatcccagctacttgggaggctgaggcatgagaattgcttgaacccgggaaggcagacgttgcagtgagccaagatcgcaccactgcactccggcctgggctacagagtgagactccgtctaaaaaaaaaaattgctatcgtgatgtttgagtttcttatatattcaacttattaattccttgtcaaaaggatagactgtaaatattttctctaattctgtcacttgtctcttcactatgttgactgtttcctgtgctgtgcagaatctttttagtttaatataatccaatttgtctatttttgcccttgttgcctgtgtttttgaggtcttacctaaaaaatctttgcccagatcaatgccctgaagagttttcctattgttttcttatagttttatagtttcagatcttccatttatgtcaaaccattctgattttatttttgtgtatggtgagaaataggggtctagttttatttttctgcatatggggatccagttttccagcaccatttattgaagactgtcttttttcccaatgtatattctttgtcaaaaatcagctggctgcaaagatgtgggtttctttgttctctattctgttctgttgctctatgtgtctatttttatcccagtagcaagctgttttggataccattactttctagtatattttgaagtcaggtagtgtaatacccctcagtttggttctttttgctcagaattgctttggcttttttggatcttccgtagttccctatgaattttaggagttttttttttttttgtttttgtttttgttttttttttttagacaaggtctctattgcccaggttggagtgcagtagtgcgatttcagctcactgcaacctctgcctcccaggctcaagcgattcacctgcctcagtctcctgagtagctaggaccacaggtgcatgccaccgcacctggctaatttttgtattttttgtagggatgggttttgccatgttgcccaggttggtctcaaattcctgagctcaggtgatccgcccatcttggcctcccaaagtgctggaattacaggcacaagccacctcacccagccgtaggattcatttttttctatttctgtgaataatgtcttttgatattttgaaagagaatgtgttgaatatgtacattgcgtttggtagtatgatcatatacacaatattaattttttcccacccataaagatgggtagcctttacttttttgtgtaacctttccacttctttcatcactgtttataattttctacccatagatttttcacttctggcctgggacgcgcgcgtcttcagggtggaagcctggcgcgcgtccggaggtgctgaggagccaaccggcccaaactttgtgggaaatgactcccctctgccctcgcccctcgctctgctaccatttccttccgtttctgcttcgcttggcgatgcaaaacgcgcgaggctcacggcagagggccgaggccacgggactctcagggccgggcccgcccctcggccgcgcagtgcggcgccgcacgccccggacgctgtccagcgttggccgcctgagcagaggctgccgcggagctaagacacccgccgtttcacccagccagcgggcccagcccgcggaggagggcggcatgcagctccgcgttgcctggctctccgggcacgcgggctacgatctgtacagtgcctgtgattacacaccaccacctatggagaaggctcttgtgaaaacggacattcagacagcgcttccttctggatgttatggagagtagctccaaggtctggcttggctgcaaaacactttgttgatgtaggagctggtatcacagatgaagattatagaggaaatgttggtgttgtactctttaatttttgcaaagaaaagtttgaagtcaaaaaaaggtgatcgaattgcacagctcatttgtgaacggattttttaatccagaaatagaagaagttcaagctttggatgacaccaaaaggggatcaggaggttttggctctaccggaaagaattaaaatttatgccaagaacagaaaacgagaagtcatacctttttcttaaaaacaaagagtttttgcttaaagtgttttggtgttttacacttctgtaaacttactagctttaccttctaaaagtactgcattttttttttatgatcaaagaagagatcatttaaaaaaagcatttctttgtgtttggatcacaaagaaactttgtttttctgcagttgatggttatttgtaaatctactttgtggtgacctgatgtaaacagtgtcttcttaaatgtacatcaattacagattaaaaaaaaaatcctgtattatttaactcaagaaatgataccccttcagcaacttaaaaaaaaaagtttgtttttgttttgtgcgtgtgtgtgttttcttttttttgttttgtttttttggagacggaatttcactcttgttgcccaggctggatggcaatggcccgatctctgctcaccgcaccttccaactcctgggttcaagcaattctcctgcctcagcctcccgagtaactgggattacaggcatgcgccaccacgcccggctaattttgtatttttagaagacacaggatttctccatgttggtcaggctggtctccaactcccaacctcaggtgatccgcccgcctcggcctcgcaaagtgctgggattacaggcgtgagccaacgtgcctggccctgtgtgttttataagagagactgggactcactctgttgcccaggctagtcttgaacatttagcctcaagtgatcctcccatctcagcctcccaaagtgctaggattagaaacatgagccaacacacccagccaaaaatcgtcttttctatttacattcagagtgcgtgtaaatttgaaattcactctacgtatcgaaattattgacattatgatgtcaataaagtttatcgcagagacgtttgaggttaattcatctgaagtttggaatagagtaacaggtataagggagagctatttatatctattgtttaaaagtttaagagtcatttatatctatcatctaaaagttttagctttcctttttaaaagcaacatttggtgacctaacttatccctggcgttaaccctccatgcccaaggcgttgtccctgggaaattgtcaggagctgagcacagggttgatcctcaccctccagagtgtagggggaatagaaaaggagaggatttctactctgttctgtgggacgacagcatcaaattgcatgttccgcccaggcagggctttgcatttcatattctagttcgcttcctctcccagacaattccagggcttttaaattaaaatactaaaattaactttaattgcaggaactatcttaggtccaatcactgtcccctactttgaccctctcatagagatcccaggtcccagactgcttggctgctggtcaccgatagggtctttcctcaaaaacctggagaacagacgcgcccagagacaggccgaaggcagcgcagaccccgcccctcaccgccccaccctctcttctctcgggtctcgcccatccctggcctcagctgcgcgcggtttcctggaaacccggaagtgaatcatggggcgtgaactcgcaagcgcagtttcctgaagacccggaagccgatcgcgtggggagccggtcttggagcagcgggtgagtttccctttgtctagattagatccgcttccagcgcttctgtacctggtgttggcggaggggttcttacggatcttaaaatcctcccgccgttccctccatcctaggtatattaatacgtcgccaagaaattcggaggttaaaatcgcttggaggctgctggtcctttccctgagctctctgccttcgggccacgtagacgcttttcgtcccgtttacctgcttaaaaccctttactgaccactccttcggtcccgcgtcatgtaaaagccctcacccatgaggtgtattcacgcccagtgggtcctccaagcctcgcccttctggcctcttggagctcggtcccgcagtctcgatgcatcagcgccgtgtcctctgcccggccctgggattttggaaaccccacccctctcctaatccacccccaaccttgtcctccttgggctgggcccttgtgttccccaggtttccccttcacaacccacattccttaccccgcattgagggaggtgacggggcctggcttttgacactcagtgtttttccgttccaaattgcacccgctggaaaatgtgctcttccagaggaaaaacgattgatttattctttcctcctctgaaactcaacacggtagtaaacactgaacccagaatacttcacttgtggtcaccgaatgtgtggggatttctccccactaacaagcagttctctatcagacatcaactcggtgtcccataatttacctcacttctgacagctgtacctggtgtaagcatcggatcccacagattaaaggctcagtccacaagacttctccacttcagatgtcggttacaagtcccagattggaacctgaacttctaagctactggatataaattgaggattcccatgacccagtcttcagtatttattaatttgccagagtagctcacagaactcagaaacgttttagttgggtttactcatttgttttaaaggatattacaaaggttgcagatagacagatggaatagcagttctagaaaattagttgaatgcaggagaggatttgggaaccgtggtgtttatctggtcagtcagaagtagaggtgaaaactactacttgtgtacagcttctaaggtgaagggtagtcttgtgggactgagcttttcacccatgggatctgacactatctccttgtagatagtgtaagaattgagttaaattttaggattcccaggtggaagtctgcaaggaactggtcagtgtagggaaaccacacattttcttgaccagaagtaaagtatcctgtgttgagcacgagagcaatgaaaacagtttggttttttcctgtctcagtgaagggaagatatttgtaacaggctcacttacctgtctcaagccccgtgctttctactcagtattgactgggaaggatctgtccctgctctttgttttaattttcttgatgtcatcttcatctcttaccgtttttctctgctgatgtgtcctgactcactgttttctgaatgtgggaatgacccacagcttagtcctccaaccacttttcctctctgtccacgtctactgcctttctatctttttttttttttttttttttttgagatggagttttgctcttgttgtccaggctggattgcaatggtgtgatcttggctcaccgcaacctctgcctgccaggttcaaacgattctcctgcctcaacctcccgagtagctgggattataggcatgtgctaccacacccagctacttttgtgtttttagtagagatggattctccatgttggtcaggctggtcttgaactcgtgacctcgtgatccacccacctcggcctcccaaagtgctgggattacaggcgtgagccaccacgcccagccactgcctttctttatcatttcatctcatggttttaaaccctacctttatgtctccatccctcatagacctctctcctaatttctagaattctgtgtccagttgtctcctcaactttcttctgggacatccaacaggcatctccatatttacgtgtccactagtgacttcctgagttctccgatgtatgctcccttgcagtcctacccatctcagataagggtgaccccatacttctgggagcttaggtgaacatattggcatatatttaaaatctaggacatagttccttgtttgaaaatgttttagggaataatataaagaaaaaattacatgattgcttaaaatgggtgaggaactagcatttccaaaattcttttgagttgagggagaaaaatgtttaaaggcctccaccctatctgatctgcacccccaggacctctctgacctcatccgctacctgtgtcggccttgctccctctgctgtagctacacagatctcattccttttcctggagctgaggttgctcctgtctcaggaccttcacctgggctgtccctctgcctaggactctttagcccctcagttgcaggtgacaaacatccttccttttctaggcctgggttctgatatcaccttctcagtgaaggtttatgtgacccttcccctgtcacaacctcacctgctctggcccatattgcctcccctagatgtttctttctgctcttttgctgtccactgtctggatcctggtgacaacaaggacccaaggggagaccagagccagaagataggggttgttctgggcttgctccctctgagtttagctcaaccctggattcgcattagaatgctgagacattttgcaaatatatctcttgtgcctcctttccagagattcccatgcatgtaggttcaagcgcagtgtcccacatgattctaatctgtattcatcattgaacatcagggtgctgtgtcttccatttctgaaagctgatatcggcctgtgatccacagagaggggagaggctgtgctctgcatggggtttggtcagggccagatctgtgccctgaaggggagctcagtccagcccagcaccccacagctgcagcatgtatgtgggcttctccaggtggggagtaagctttgaagaactcaaaaactgacttgttcttcctgtaggactttcttgtctgcatcatccctggtgctgtgggcagcagagggccatctttccacagggcgaggtctttcctgtgtatgtggttgtggcacagggagggggtgtgttgattttgagcagtaaacagcatattttgaacactcaggattaacttgttttttaaaaagttttctttttctttttctttcaggattagcttctaaagtctctttcatctctcctaaggaagaagcctagaagaggaggaagaggaaagaaaaggagtcaggaatgcctcttaggtacagtgatattctcagtggactgttgtgtgtctccttcctttctgaaatgccatgtgtggtgttatgatatatattggtttccatcgacggttcctggcttataacctccatagcccttgttacaatcttttgttgtaatgttggatgtgttaagcctcaggggtaggcctctgaccttcttttgccttcctttcactctgatgctccccagcctttctaattgtgggtcttaagaccctcctccgagagcttcccaccctgtaccctggggggaagaatgttgatgtcatgaaacttccataaaaacccaaaagggcaaagttcgatgagcttctggatggctgaacacgtggaggttcttggaggtagtaagcccaggggcgtcatggaagccctgcactccttcctccataccttgctgtaggtgcctcttcgtctgtatcctttgcagtatcctttataataaactggtaaaggtaagtaagtgcttccctgagttctgtgagccaatctagcaaattaattgaagagggggtcgtgtgaaccccagtttgaagctgggtggtcataagttctgaaggcctggacttgcgactggtgtgtatggaggcaatcttggagactgagccatcaactcgtgggatctgacgtctccagtcttaatgtacacagtagatagtgttggaattaaactggaagatacccagctagtgtctgctgcttggtgtgtggggaaagtacccacatacatttagtcacagaggtcttctatgttgatgattgttgtggtgtgagagtagaggaaaagcacaatttgaggagagcttttccctgtacacatcaggcattggagatgtcagtcttctctgagtctgaagcatgctgcctgtgatgtttgctcacactcacccatgtcttccctcaggccctctgatgtcacttaaattccatctcacagtgactggtgctgtggaatttgtgaagaggctccattgggaagggcttatacccagacatggatggagacggggtgtgggccccatggtgtcactgctcttgggcagcaggaattgaaggattgtttaagggccaggtctggaggcactgccagctctgtagactggattatggaagctgctcgtggaagtcttaatgtgcacaactgcctgataaaatttggaagaagagattaggaagaggaaatcttttctgcctgattttatactccatttgtagtaaatgtttaacagcaagagattctttaaaccattctaagtacatccatcctatggagattgtggtattcctgcagagactcttgtgaaacagatgtttcaggtgaaaatggtaagacttgggtaatacttcttctaggatggggcatttcctattttcttagatctctcaaggttcccctgttatccccagctgcaggggtacctctcctatcaagaacatgtgaaattttgccctcattaaaaaaaaaacaacaacttgctactatgtttatatatatatatattttgaaaatctgggaaaaatgacaaccctctgtattttcatttttcaatttattgtctacataggttttattattttggggacatgtatatacaaaatgaattttcatgctttgctcaattttctttccatgtattttagtatgtgttttaatttctgtggtttttatttctttcatatgccctgatgtcttttatttcaggttatacattttttaattgtaagacaaatctttcatttataccttctgatttttgttgtgcctttgtttgtttcatcttgatttggaaggccttgcatgattatgaagtactaagtttcatttaggaataaagttttgttgtttaaaattttgtttacatttgtgtttaatttgaatttttgcgtatatcataagtatttgatttgttgtaaaattacagatgtttgtcataagaggttcttacatatttggaaaacccctccattttgtttttcttttcaaaattgtgatggttctcctttcacagggcacagtcattaaaaactcatatatttcttttgtgtttgaatggctgtggattcctagtcagagaggtctttgtgtcaccacatctgctaataagaattgggttttccggtccatgatgctctttgttatgtcttttagtaaagtttatttgcctgtttatagttcagtaatgttaagtatgttcacgttactgtgcaacatatctagaagtttttcatctcgcaaaactgaaactgtatacccagaatacactatatcccttctgacctcactatagcctctgtcaacccatctttctatgttgtttatatgcatttgactactttagtatcccacgtgagtggaatcacatagtatttgtccttttgtgactgtcttattttccctagtgtaatgtcctcaaggttcatccgtgttgtagcatatgacaggattttctccttttataaagctgaataatattccattgcatgtgtataacacattttctttatccattcatctgtagataggcatgttggtttttctgtcttcttggctattgtatataatgctgtgatgagcagggatttgcaaatatctctttgagggcctgctttcaagtctttaatgtgtatgtacacacacacacacacacacacacacacacacacacacatatatatactaccatatgatccagcagtctcacttctgggtatgagtgtgtatatgtagatatgtgtgtgtgtgtgtgtgtgtgtgtgtgtgtgtgtgtgtatatatatatatatatattttttttttttttttttttttttgagatggagtcttactctgtcaccaggctggagtgcagtggtgcgatcttggctcactgcaacctctgcctcctaggttcaagtgattctcctgcctcagccttccaagtactacaggtgcgtgccaccatgcccagctaattttgtatttttattagagacggggtttcaccatgttggccaggatggtctcaatctgttgacctcgtgatccacccacctcagcttcccaaagtgctgggattacaggcatagccaccgtgcctggccagatgtatattttcaaatatgtacgtgtgtgtgtatatacacacacaaatatatatacgtgtgtgtatgtatatagatgtataaaatatctacacacacccatgcccagaagtgggattgctggattatatggtagtactgtttttaatattttgaggaacccccttactgacctcagtaatgggtataccattttacattctcaccaactgtccacaaatgttccagtttctcagcatcctctccaacactttttttttttttattgatgatggccatcctaatgggtgtgaggtgatacctcattgtaatgttgattggcatttgtgttatgtttggtggtgatgagcatcttatcatgtgcttgttggccatattgtcatcttctttagaataacatctgttcagttcctttgcccattcattaattgggttatttatttttggtgttgagttgtagaagttacttgataatctattaatgcctatcagatatgtgatttgcaactcttctcccattccgtaggtttgccttttccttcttttgatcgattcctttgaagtgcaaaaactttaagttggatgtagatcctttagtgttttgcttttcttgcgtgtgcttttggtattatatccagtaaatcctttccaaaatcagtgtcgtaaggttttcttctatcctagtttgttacgtgtattaatctggaaatggtgttgaattgttcctaatgctttttttgcatcaattgagatgatggcattgtttttgttctgaattatattaatagtagtgatatagtttttgttggggaccagcctcaacaccacccattttttcttttttaaaaccaccgttgctatcatggcttgttcatggtgtctggtctctctccagaggcatcttccccatctgcagactaaaagcaaacagcataaaccgatacacattaaagtaaaatttgcaatagttgatcctccaacggtccatttaagaggattcacatttgaaagtccatcagcagctccagctaggatgtcaattccaggcaggagagtgaaatgcgcctgagatgcttcaaaaatgtgttcctttcatttggctatatccaatgttaaatttccatcccttccttccagatgatgtctaactttttcccaatgatgttcagtagcattatgtgaatggggatttacgcagaaatcagaagtatttccaatcacattacatttgcaatagatgctctaagctcattatacaatctcccatccatattaacagtctgtctaagatcattgatttgccaattttctttggtctgtttgagtctgagaattccacaattttgaggaattattttgccaattatttacatattctgcagtttgaacagaggaatgtaaagcaattccagcagcactccccttaacatttctgtgatgatatgaatgtaaggagaggcttcccatggtctattgagggaaactggtatccaaactccttctctggcccttaccagcaacacagatgttttcacacaaaacgtggaatcaatacgggtgaaaaggcaacagttttgacatttaataattttagaattaggtcatatatgaatatttctgaccatcaacatgaaaggaggcttgacacaactctgaatggatactgttctgttggaagaaaactgatacacaaattgaagtgtctcaccttctccatcaagatagtattttccttccaaactcgaatatgagattgggccatcattaacttccatagttcagggtgttcagggcctattattggattaattatttttggatgtggtccggctgtaccaaaattggtccaaattatgggaaaatgagcacacttttcagtgtaagtagtgtcatctctttgatagtatagatcctgttttagttttgtctttcatctatcattctgattggtacaattaactgcaaaagtcctcttaggggaccaatcaatgatgattccataggaattattttgcagtagcacaccatgatcagcaatgcaatctttccaaatcaatatttctaaatcctttgaccattgttgagattgttgacacctctcttttctggtcttaaattgttccagttggaccgaactctgtgaatgagccaggctccatccagaaagtaaatgataggatactggtctttgattatgacctgaagtcttaactagccaatgttgttgatagccttttaggcaaccgatagctggccctatgtaaagaggggggactgataacccatggacacatttattaacattccttcctcctctgggtgagagggcccatgagtatctgtaggctcaggcatccaaacactattattaacataaacctcaactgggggttccaacaaagtgacagacctaattaaaggcaggaatgggacatatgcccaataggtataattttggtctgctgtagtcacagggagacttaccgtcatagcaattaccgcaatcatagccacgatgaggttactcgagtttagtggtttttgttgtgccttcaggttttcttctgcaagctgggtcagcctcttgatgtgtcccaagtcagtgggctcacttgacgggttttgtttgtcttcatgtggtcagctgaaatgttcatttgagccatcaaggtgtgcttgggggttgagatcttggttccaaaatccttttctttggaattttgctcatggtagagtttaagatgttttgtaggtacccaaactggaagctggttttctcctggggaaatacaagcaaaccctcttccccatgttataactctccctctttcccaggtctttgttttaaagtccttccaccacacaggttttccttcatgaacatttatcttctgtcttgttaaatgctgctcagctgctgtagtaacctgatcctgggagatgttcaaaaaatttaaggtaacaagagccaattgtaattgcatatgaggggtggaatattccctatctccccctatctcctgtttatgtaattgcatttttaaggttcgattggctcgctcaacaatcacttgcccttgagaattataggggatacttgtactgtgtttaatgctccactacagtagcctgtccattgtctgtttttaatttttttggaattcccatgacagcaaaacaggaaaccaaacgtctttttatatgtgctgcagtctcaccagtttggcaagtagcccatataaaatgagaatatgtatctctggttacatggacataagaaagtttgccaaatgtaggaacgtgggtgatgtccatttgccagatcttgtcaggtgccaacctttgaggcttaacaccagttctttgatgtggtaattgcctggcactgaggtaagtcaaaatttggggcatcagtcagtgagggggaaaccaacaagtcagcttgctgattagccttagtcaagggtcctggaagattggtatgtgctaggacatgagttatatagaaaagaaattcccaggcatgcacaactgcttgtacagagttgaacaattgataaagctgttcatcaataatatatttaattaaggcagttttaatatgcagagtagcttacacaacataagctgaatctgaaacaatattaactggctgattaaaatcttctaatactgtaatcaccacctgtaatttagctgtttgggctgaggaaaagttagtatggataactttatcacaaggtcccacatatgccattttcccagtactgtagccatcagtaaaagtagtcacagcttcttccaaaggggcatcctgagtaatttttggaagaatccatgtagttaattttaagaactggaaagttttatttttaggataatgattatcaatacatccaacaaattccgctaaattaacttgccatgtaactgagttaataaatgcctgtttaatttgatttttattcattggaactataattttattgggctcagtgccacaaagtttaacaattcatataccagcctgtccggttaaaattgccatctgatctaaatatactgtaagtgtttttatggtattatgtggcaaaaaggaccattcaactaaatcatcattttgaataataatcaccattagggagtgcaaagtagggaagacaatgaattgtagaggcaagtctgagtcaatcctaatgacttgggcttgctgaattttttcttcaattactcttaactttttcatggcctcgggtgttagtcctcttttactgtgtaagccggaatctcccctcaatactgagaagagattagacatagcataagtagcaattcctaaggtgggccaagtacaataaatatctcctaacaatttttgaaaatcatttcaaaatgatttttatttcaaaaaggtttttaaagaattttttctaatttgaaccttttgcggcttaatggctctatcctgtacttgcatccccaaatactgaaaaggagtcattgtttgaattttgtcaggtgctataagcaatccagcgtttgtaattgccttttgtaaagatgaataacattgaataagttgttctctattttttgctgcacagagtatgtcatccatgtaatggatgatgtaacaatctggaaattgatctctaacaggctggatacctctgcccacaaaagtttgacaaactgtgtgactgtttaacatatcctgggataaaaccttccaaggatatctggctgcagattctttgttattaacagcaaggatggtaaaggaaattttttcaaaatctgcctctgctaaaggaattgtaaaaaagcagtctttttaaatctataataacaagcagcccgtctttagggatcatggtgggggatgggagcccaggttgtaaagctctcatcggttgaattacagctttgacccctcacaagtcagtcagcatgcgccatctgccggactttgtcttaattacaaatattggggaattccaaggaaagtgggtgaaacatggcctttttctagtagttctttaactatttcatgaaattcccccaactgttccttgcagagcggccactgtttgacccagacagtagtaaactgcagggcgagcctgaattgccccctccccataatgaactgcggggcaggtaataattggcacggagagccgagtctcggtgagccgagtatcgggctccctcccccaccactcactgggttgaggaggtggtggccattctgggcattcctctggagaagccgtgggctgaacaactttctgagtaggtttagggaaactggaggggattggcataaatcacctctggactctccttttggctagtacttggtagaggcggttcagagttctgattatcaaactcctctctctcctcctctgactcagcctcatcgtctgtctgaaaaggctccagtgctgcacgcaccaatgaccaaactgaccaaacaggaaaaggaatttcctttccttctccctttgttcttttaaggtcctttccaactctttcccagtctttcaattccaaagttccctctttaggcaaccaaggacaaaactgttccacagcatgaaacaaatccgtaagattttccttatcaacttttaccccactatgcttcaagcgttgctgtagcaagctcaaatacgtggcgtacttatattcagtttgtcccatttgtgtccctggctttctctgagtgcctcgcttacctgcagagcttaaaaactttttcatcctcaggagtcctccatccgtcggccctccgtttcacacgcttgagcgttcctttaccagattctctcgggccccatggttgggtgccaagctgttggggaccagcctcaacaccacccttagggtactcaaagtccaatggtgacaaaggaatgagaagagacaagttaagagtgcataaaggtgggggccacggggccagattcaaggtaggagcctgcaaaaggccctgatctctggtctccacactattgtgtacaatcacttagatctgagaagcagatgttgaggggtgaaacgatgaaagggaggtgatgtgtcatacacctaatctatagcagtggcggtttaggtaaattttctttgtgctgaagcagcataaactttactactgatttattctttaacttatcagagagcagctgtggggagtgggcttaactaggagccagcaagtctggccacattccattgcttcaaaggagtgtctttctccttgaacacaatgtttacagataagagagcaggtcttgctcagagcatgcgaacattatggcaattaggaggctttcctcctcagaggcctcttgtggctttctgcaacttattgtcccatatttttatggccagtttatacaggcaccccgtaagccctttccccaacagttttctctatgttttttaatgtttataccattttttactagcttaaaatagaaaaatgttgatgaactaaatgttgatgaacagttgatacatttcattgttccatacatgctgaaatggacacaaacaaaaatggcgatttttaagaagttgttgaaaaactcacttgtggacaactgttatataagttaatttaatcgtgtgtatatgtatgtctacatgagtgcatggatgagcaagcccatggctcttatgaaacactcatcataatttaatcaataagttttatatttaacacttgaaattatctctacagtagtttccatggccttaaatttttcctacactgtcacactgagttaaacaatagtaagcatagtgctgtagtatgtgtttgcatgtgtgtatacataatgtgtgcatatataatcaatatataataccctttcatgaagttccatgttgttatccttgaactcatttcacgttttcccaggcaaccctctcttgattaatttttttttttttttgagacagagtctcgctctgttgcccaggctggagtgcagtagaacagttttggctcactgcaacctctgcctcctgggttcaagtgattcttctgcctcagcctcccaaatagctgggattataggtgcatgacaccacacctggttaatttttgtatttttagttgagacggggttttgccatgttggccaggttggtctcgaactcttgacctcaagtgatctgctggcctcagcctcccaaaatgctgactgtgattacaggcatgaaccaccacacctcaatttacttttgtagatcatatctgttagtaacttgttgagcccgggaggtggaggttgtggtgagctgagatcgcaccactgcactccagcctgggcaacaagagcaaagcactatctcaaaaaaaataaaataaaataaaataaataaaaaatttagctgagcgtggtggcacaaacctgtagtcccacctgcttgggaggcggaggtgggaagatcacttgagggcagtcagttgagatggcagtgagcatgatcaaaccactgcattccagcctgtgggaaacagagtgagaccccagctcttaaaaaagaaaaaaaaagaaagaaagaaaacaaactacaaaatgctgacgaaagaaatcaaaggcactcaaatggagacatatacaatgtcaatttattggaagactcagcatagaaacaatgtgaaattaaccaaattgatatacaacattaatacatttcctatcaaggtgttttgtggatactaacaagattatccaaaaaattatgtagaaaggcaaaaaaagatagaatgcctaaaacatctgggaaaaaaaataaaaaggttggaatcatttcatgtgatttcaagtcttctaatatagtataagtatttccttctttttttcatatttacaataaacctagtttatacctgccgtgatcttatgtgcatactcatgcatattttttttctccaaataacagcttcatttatgtgccccctaaacttttcactatagtaacaaagggaagaaatgcatgaaacatagaatgtagactgcaacatatggaaaaggaaactttttaaaattgtgtacaaaaacaaaaaataattttattacaattaaagaaccagagaacattttgcttaataccataatcaaaaatgacatttctgtagcttttggaaaaatgctcttctagtagagtcctatttattatatataacaattagataatgataaattatattatgtaaataaacacttcacaataattttcactgaactgatatgaaaaatatcttaggcaattttactaaacagtatttcacaagcattttcaacagtcatattgtgcaatgggacctatgtgtccagccacaagaggaatgtaataagctattaccatgaagaaaattgaagtctctcctaaccaagtctggagtttcaagagtaaacattcagtgttatcctaaagagttagacttcattttgtgatgtctgagtaatgtgatggttaatattaggtgtcaacttgagtgagttgaaggatatctagatggctgataaagtattgtttctgggtgtgtctgtgagggtgttgccgaggagattgacatttgagtcagtggactaggagaggaagacccaccctcagtgtgagtgggcaccatccgattggctgccagtgtggctagaacaaagcaggtggaagaaggtgggataaccttgcttgctgagtcttctggttctctttcttcttcccatgctggatgcttgtttatgcttctcctgcccttggacatcagattataggttcttcagcctttggactctgggacttgaaccagcagcttcctgggatatctcgagcctttggtcacagactgaaggttgcatcattggcttccttggttttgaggttttcagacttggactgagccactaccagcttctctcttctccagcttgcatacagcctatcatgggacctttgccttgtaattgtgtgaaccaattctccctaataaactcccttttatatatacatgtatcccatttgttctgtacctatagagaaccctgactaatacagactttggtacctggagtggtttttttttgtttttttttttttgacagggtctcactcttttgcccaggctggagtgcagtggtgcaatcttggctcactgcaacctccacctctgaggttcaagccatcctcctgcctcagctccccaggcagctgggactacaggtgtgcaccaccatacctggctaatttttgcattttttgtatgatgtggttttgccatgcttcccaggctgatctcgaactcccgagctcaagtaatccacctgccttggcctcccaaagtactgggaatacaggtgtgagccactgtgtccagcctagaggaacaaaattttaaggatgaatttccttagttggtttaggggcttctggagttggctctctaatcttattacaactaaaaatgctaaggtctctacttctaatagtacagagaacactgatagtccttggtatgcattgttcagagacttgtgcaaaataaatgtatttgatactcatgattcagtgctcctgagaggcaaggagtttagtgactttatacatgatacttttcaacatttctggagaaccaaagaacataatgaagttgctttcctaagttccctggtaaaaaatgatgaaagaaatggataagctcagagatgatacctcccagatctagaatatatcatacttagcctcaaagcttctaagggtaccctgggtgcgactgttttgtagacaaaaggctgaaattgccaaaaatcagacacaagctcttatgtgagtggatgacctacaataattggtgcacactcagcctcaccaggtatctataaagtaagggcattgattgggaaagattgggagcatgtaacttgacatggggatgtgtgggaggatcctgatgaagctgggaacactgagctcttaaaccctgatgagccctttttgcgagagaaaatggcctccctacccctcatggtggcaacatcttcttccccaccaaggctgctttcagcctttgtaccttttttctgaggacattcaccatgcattgcctgaggaaacaacaatggcctcctctgaggcagatgcgaggcaaggcaatgctgattcttctcaggatcctcccccaccacccttctttgcctctagacctgtaactagactcaagtcccagtggctgctagaggtgatgtgacccgtgaggaggtgcgctgcactccaaaagaactgctgaggcataattatgacattattgtctatatttggagattatgatttaaggagatgtgtatgggtgccaagttgatgaggggtagacttgtggttaatcttggttgtcagtttgattggattgagggatgcctagatggttcataaagtattgtttctggatatgtcagtgagtgtattgctaaaggagattgacattggagtcagtaaactgggagaggaaggcccaccctcagtgtgggtgggcaccatccagttgactgccagacggctagaacaaaacaggcaaaaggtagaataaattgacttgctgggtcttctggctctttcttctttctatgctggacgcttgcttacactcctcctgcccttggaaatcagactccaggttctttggccttcggactctgaggcttgcactagtggcttcccaagggcttccaggcttttagccatagactgaaagcctaatatggattggatctatgtccctatccaaaactcatgttgaactgtaatccccagtgctgaaagtggggcctggtgggaggtgatttgatcatggagggcatttcatgtggtttgacaccatcttcctctttgtgctaccattgcaatagtgagttcttgtgagatctggttgtttaaacatgtgtggcacctacccccacccacttcctcctgttctggccatgtgaagtgcctgctcttacttcaccttccttcatgattttaagtttcctaaggcctccctagaagtcagagagatgctggcattatgcttccggcacaccctgcagaactgtgagccaattaaacctcttttctttataaattacccagtgttagatatttctttatagcaatgtgagaatggactaatacaaggctgtaatactgttggcttccctggttcagagacttttggattttaactgagcgactaccagcttttctcttccctggtttgcagagagcctattgtggaacttaactttacaattgtatgagccggttctccctaataaactcccttttatatatacacagatcctattagttctgtttctctgtagaaccctaatacaattactaacacattttacacctctgcactccctctttgtattctgcccatcttgtcaagctgataataaagcctgagtgccccctccttttgcaccagctggaagttcaaaccacaagtgggtactccaaccccagccctatcctttaacaatcatggtaccccaagccagtcatctattccagttctctgaagctgcatttgaaccagctagagaagtctaccctgctttctccataaagcctcattatgtaataaacattttcaggccatttgagtgtatggcatcatcattatcaatatccaaaccaaacctcaggtagactttagacaagttccagtacagtgggcaaaagttaaaattaccaaaaaaaaggtatgaaggtgaatatatgaaatttctagtcagtctgccaaaagaaaacaatactcattttgtgtgttcattcttgagaaaatgtatgaagattagtattttcagattaatgtcactaatacgaaaaagacattattacagtatttttacccttaacctcatacctttttacatcttatttttcatattactatattggtatacttcatataaatgaaagtgcatgccatgggtcttatttggcatacacacaaaaaggcacatagaaatataataatatggtggccaggcacagtgactcatgcctgtattcccagcactttgggaggctaaggcgggtagatcacctgaggccatgagttcgagaccagcctgcccaacatggtgagaaccctaatggtgcattattattgtctgctataaagtatcttcctgtggtgggataaaacagtgttggtagacataacatgattcattcatacttaagaaaatttaaactttattacataaaacatgagaactatgcacattctaaatcaaagttgcacattatattaccaacagttaaatgtgaattctattcaagaacatgctatattggcagttttcattaaactctctactctgatataactgttctctcttccatttcaaaaataagactatagttcatcaatttttgctaaacaacagctattgctattcagttgaggaggtggccatcatttcccctggatgatttctatggcataatcagtccctaagaacccattactcttttccataaaaatcctattttcctaaggccatggcatgctctattttgaggttatttggtagagcatagaagcactaagccattctgtaaggaaaaggatacattgaacacaataagtataatgactggcatcatagttttacattattctctgctcacctccatgccatgaaaagatttcaaagttcaggctaaagtcataaagagtaaagaagccttttcaaaaaacctcccaaataattttttaaaaaattataagctgaatataactgatcatttccacatgccgttgaacctttggtacacatcatgtcatgaggataaacatattttgttgtataatatttcttcagcatgcaatgtcatacattaatataagagaaccagagactgagttatttcttgcataagtcttctgatgtactctagtaatattccttgagttatagcctcagcatacaaaatctatctgtgaggtattttcaaagatatatcttttgatgtctagtgatgtggcaggcctcgacaaagcctgtgtcttgtacactacatttacatggtttctctttactatggactctgatgttgattaacgctcatgatgaaaagtttgccatactcggtttgtaatgactgtctcatgaattaattatctgatgcggtgtaagttgtgatttgtgactaaagaccttaccacatacatggcatttgtaatgtttctcttcagtatggattctgtgatgatatgcaagatgtgaaatctgagtgaagaccttaccacactcattatatttgtaaggtttctctccagaatggactctgtaataacttgtaaggtggaacttttgtctaaaaacctagtctcactcactacatttttaaggtttctgtgcattatggattattttatgaaaggcaaggcttgaatgcacactaaatgcttagctatattaattacatttgtaagatttctctccagtatgaactatctgatgttttgcaaggtgtgaaatttgattaaaggctctgccacattcgttacatttatgtctctctccagtatgaattctctgatgaattgttaaggagaacttgttcctgaagtccttatcacattccttacatgtataaggtttccttccaatgtggattaacagatgggcagtgaggcttgaatgcccaccaaattctttggcacatttattgcatttgtaaagtttctctcctgtatgaattctccaacattgtgctaggtatgaatagctactatagaccttgccacattcattacatctataaggtttctcttccatatgaattatccagtgttctgtaaagtgtgaattgtgactaaagatcttaccacattcattacttttgtaaggtttctctccagtatgagttctccaatgtcgtgcaaggtgtgcaatttgattgaagaccttgccacattcattacatttgtaaggcctctctccagtatgaattctctgatgattgcttagggataaactatgcctgaagaccttgccacgttcatgacatttgtaaggtttctttccactatgaattagaagatgggcaataaggcctgaatagtcactaaatgctttgccacattcaatatatttgtaacacttctctccagtatgaattcttcgatgtcatacaaggtatgaaagttgactaaaaactttgccacattcattacatttgtaaggcttttctctggtatgaattatccaatgttctataaagtgtgaactgtgagtaaagaccttgtaacattcattacatttgtaaggtttctctccagtaagaaataactcagtctcgggctaaaaactttgccacattcattacatttgtaaggcttctctccagtatgaattatccaatgttctgcaaggtgtgaactctgagtaaagaccttgtaacattcattacatttgtaaggtttctctccagtatgaattctctgatgtcatgcaaggtatgaattattcctgaagactttaccacactcattacatttgtaaggtttctctccagtatgaattctctgatgattgataagggataactcatacctgaagactttgccaaatttttttacatttgtaaggttctctccagtatgaattacaagatgggcagtgaggtctaaccactcgttaaatattttgccacattcattatgtttctgagactttctccagtatgaattcttcgatgttgtgcaaggtttgaattgcaactaaagaacttgccgcattcattacatttgtaaggtttctgtcctgtattcactcactaatactctgtaaggtgtgaattgcgactaaagactttgccacattccatacatttgtaaggtttctctccagtatgaattctcagatgttctgcaagatgtgaattgcgattaaagaccttgcacattcattacgtttgtaagatttctctcctatatgaattctgtgatgttgtacaatgtatgaatttttcctaaagactttaccacactcattacatttgtaaagtttatctggatccaggattatgtcatggttaccaaggcttgaagacactctaaagactttgccatgctcattacattcataagatttttccctaatgtgtgttttctgttcttgtgggagcaatggagaatcaaaaaaatcaccacttacatttattaacgtgagttttcacaccagaagaaattttttctttcttttctttctttcttttttttttttttttgagacagagtctttctctgtcgcccaggctggagtgcagtggagtgcagtgatctctgctcactgcaacctccacctcctgggttcaagcagttctcctgcctcagcctcctgagtagctgagattacaggcgccagccaccacgcccagctaatttttttgtatttttagtagagacggggtttcaccatgttggtcaggctggtctcgaacctctgatctcatgatccacccgcctcggcatctcaaagtgctgggattataggcgtgagccaccgcgcctggctgagtgcagccaattaatatcccctaatagctgttgaaaataatttgaagtctgtaacctgtctttacagagaactactttctgaggctgtacacttctttcagtaacaatagtgcctgcgtaatggtatggggaaattgtaccttttctggagctattttgagattccatttagttaaagcctgctttgttcctcggaataactcatgtgagatttgatctgtaggagcgaccaaaagaatgtcatccatataatgaatgatgtaagcagtaggaaacatattccaaggctcctttcatgcccttcctacaaaatgctgacatagtgtaggactgttaagtatgccttgaggtaaaactttccattgatagcgagaaacaggttctctttgattaatagaaggcacagagaaagcaaattgaggcttatccttcttatgtaagggtatagtaaaaaaaaaaaacaatccttaagatctattactacaagaggccagtatcttggaatggctgctggggctggcagaccttgctgtaatgcacccattggtttaatttgtgcattaacagctctcaaatcatgccacagtcaccatcttccgggcttttttgagataacaaacactggtgaattccagctgacatcactatatgtcctgcatccaattgctcttttactagctgctgaagttgagtttgtttctcctgtgttaggggccattgatcgacccatacaggtgttttgctgagccattctaatggtaaggcagttggcagaggagaaatatcaatgacccccatcagaaatcctgatgtcctagcccttttctatctgtttttccagtttctcatatcgggttaggagttccttgtaggaatttccctaaacttttcccactctgatatcccatattcttcaacattttaaatcctgggttatcaaattttcacttgtaagtctgctatcccatgccgtaagtctcagccccataaattgatagctatatttgcaacatagagctgaaaagtatatgactgtccacccagaccaagacaaagtaaaatctcagcactctgtcaaacactttgaactgctcctactcccactagggatgtggaggttagtctgagaggccatggtaggggccggtccttactggttattactgacacatcagctcctgtgtccattagcccataaaatttcttttctttaatttgtattacacaggtaggtctattagagtttatgggttgggatagatttcccatgtagttgtgctcccaaaccctttgttccctcatttctcttttcatggagaagggtgtaatttgcagagaataagcaacaattgagcaatatattctcctggttcaaaaacctgaagatcttgtgacattaaaactacttgaatttctccttcataattggagtcaactactccagggactacagtgatgcctcacaagttaagatggctcttgcccaaaattagtcccatgtatcctgctggtaaaggtctctaaatgccagggggagctttggtaggtttgtctcctccaactaatataattctttctctggcagggagatcttatcctggacttcctggtgttcctggggtgagggaatcaatgtttcttctgggacccacccctgaagtgtggttgtggtctgaaatatgaatgcccttattgtttgaggggcctgggtccaggcccccttctcatttcctgatgggggtacgattctgatgaaattttgagtggcactgattagcccagtgattttctttgttacagtgaggacagagtcctggcattttttcctggtagtagtggggaaccgcattgtaaggtcctttctctcttgagatctcactgcattcctttttaaaatgtccagttatttccacagttataacattttcccattttagggttttttttttttttccattttagggtttgaccattggctctttttagacttatcaactgccaaattagccatttcttgtgctaacattgtggagcaatgcagctcaattcccacatcttgacaagctctgagaaaatttcccaagtttttgtacatttcacaggtgccagtgcatgtttacaatctgcatttgcattctgaaaagctagggttaaggttaacatttctgcagcagtggtgtgaggaatctgacacttgactgcctcttgagatcctgcaagaaattgtgcataaggttcctgagacccttgcacaatatttaaaaaggattgtactgggactccctcttctgtaattgtggcccaggcatgtttagtggccagtgcacactgctgataagcagcgtctgggagtgccatttgatgttccaggtctgaataagggccatgacctaacagcatatcctctgtagtgtctctgtgtccagcagcacggttctgtctagcttggtctgcacacatttcttgccaatttaaattccatgtcaggtatacactagcagacaaacaagtgcaagccaaatgctttacatcaaagggtagaaggtgcatagcaccaaatacagattctagcaatcctaaagtgaatgggctctgtattccattattaagtacactagctcttaattccttcaacaacttaaactctagtggggtgtgttgatgaataagctgctgtgggctatttgtatcgggccttatggagataggaaaagcacagggtcctaagagctctccagctatggcagcagagcataaaattctctctattggggtttctatttctgctaccgaaggaggcggtacagatgtttctgcaattggagggggcggtacaggccaatttttatactccctctcctgttttttattttcaactggtgctgtgggtgggacaacagattctttcagatttttagactcagaacatgactccttctgtccagcagaataagaaggagataatggcagaaggacagtatgaacaaaactccaagtggagaaaacagatgatcaactttaaggcctgcttgatgagcccattttattttattttattttttatttattttttgagacggagtcttgctctgtctcccaggctggagtgcagtggcatgatctcagctcactgcaacctctgcctcccgggttcaagcaattctcctgcttcagcctcccatgtagctgggactacaggtgccggccaccagtcaaggctaatttttgtatttttagtagagacagggcttcaccatatttttcaggctggtctcgaactcccgacctcaggtgatctgcccgcctcagcctcccaaagtgctgggattacaggcatgagccaccgcgcccggctattgatgagcccattttaatccttctcctgctctgtcccaatttttcaaatcaagagtgcctgtctgtggaaaccatgggttatgcatggtaatctcatgcagaagcttagttaatgtctgacaactaacctgagccacagattgtttaagtaaaacttcaagcaacttcacataaagtttttcttcaataaacaaattgtgccccatgttaacctgattcagaaatttctctttcccaaggccgggcgcagtggctcacgcctgtaatcccagcactttgggaggccgaggcgggcagatcatgaggtcaggagatcaagaccatcctggctaatgcggtgaaaccccatctctactaaaaatagcaaaaattagacgggtgtggtggcgggcgcccgaagtcccacctacttgggaggctgaggcaggagaatggtgagaacctgagagtcagagcttgcagtgagcggagattgtgccattgcactccagcctgggagactgggagacagagcgagactccatctcaaaaaaaaaaaaaaaaaaaaggaaaaaagaaacttctcgttcccagtacttttttgaagcactgaccatagagattccattatggttttgacattttgggaaaccagttttaccattgtgtcagtaaaacagtaagatagtttgagagcatatgatctaaataaagatatttgaagggttagttggaattctaaaagtaggtaatggccaaatagcattctcattccttaccagacaaaaacttctttgtcaaaggaattagaaaatgtgaaaatattttttccagataaagctcatatgccacttccaattgactaatgaaatataatagacagactgaaaaagtggattatgatttttttatctgtattcatttatttatttattgacgcagtctcgctctgtctcccaggctggattgcagtggcacaatcttggctcactgcaagctccgcctcccgggttcatgccattctcctgcctcagcctcccgagtagctgggactacaggtgcctgccaccatgcccggcaaattttttgtatttttagtagagacggggtttcaccgtgttagccaggatggtcttgatctgacctcgtgatccacctgcttcggcctaccaaagtgctgggattacaggcgtgagccaccgtgcccagtcgattatgaatcttaaaatgcttcctgtaaatattatgtagctaaagattgatttccagcatctgacataatggtaggtttcttgttaaccagtttctcttctttctgggtaattgcaagtgaatatgtgcacatactgaccgaaataaaatcagggcctgaacttagttgtttactgaaaattcctgggcaaatagtccataaaagctgtttatctctgaatgcactatggctggttaaatacagagaacatccttcttccagctgtaaaggatgaagcatattaaacattacccaggcagatgaagctaaataaccatacagcagctctgtctgacaatgttgtgctggatattgcagtttacttttcaaggtgcagatgtaaggatttaaaaaaaaaaaaaaatttttggccgggcacagtggctcatgcctataatcccagcactttaagaggccgaggcaggtggatcacaaggtcaggagttcaagacgagcgtggccaagatggtgaaaccccgtctctaccaaaaataacaaaaattagccgggcatggtggcacttgcctataatcccagctactcgggtggctgaggcagagagttgcttgaacctgggaggcagaggttgcaatgagccgtgatcacgccaccgcaccccagtctgggtgacagagtgagactccatctcaaaagataataataataataataataataataataataataataataataatttggcaccaaataaatatgagtagcatcctttggcctatgaaatagagtcaggatttgcagggaattgagtttgagaaatgaatgaataaaggcaccgtggtgcctgaccccctcattcatgtgtgtgactctgagcactcacaggcatgtccagcaactcagcccagggcaggtgggttagcctggggttataccttgaaccttatattactctcagtacctctttagggcactgaccttatatcggctgcggcagactcctcctggtgtccccattcatctgatcaatttcacttcttctgctccagcagaccttcttccttcatgtcctcctatccctgtgtatgggtgccatgttgccgtggaccctgttggactgaacaaaggagaaggaacgcgggaattaaagacaaaagaatatgtttggaagaagtggtcaggggactccttgcttctggtgaacaagggccctgagcatctagcacctttcacattggataagattagttgtgacatgttgacttctgtgtatataatataataattaaaacttgtttcaaattatacatatgagattgagaattttaaacttcctatttataagacatgtacaatctataaatcttggcatcagaggttagcttccacttgtaatccctattcagcccaaggacagtgacttatgcagttgtgtgtcactctcttcccttttcccagagtcgggtaggaaatggggaagtgaagtgggagaaaaaaatcactttctgttattacataatactttaaattaaattaattctttaagacaggcctgctctatctcccaggctggagtgcagtggtgtaacttcctctaactgcagccttgacctgctaggctcaagcaatcctcctacttcagcctcccgagtagctgggaccacaggtgtgaaccaccaagaccagctaggttttgtattctttttgtagaaatggggtttcactatgtttcccaggctggtctcaaaatcctgggctcaaaggatcctcctgccttggcctccaaaattactggtattacagggatgagccaccacatctggcctacatagaacttttttttgagagagagttttgctcttgttgtccaggctggagtgcaatggtatgatctcagctcgccacaacctctgtttcccagcttcaagcaattccactgcctcagcctccggagtagctgggattacaggcatgcaccacaacgcccggctaattttgtgtctttagtagagacggggtttcttcatgttggtctagactggtctctaattcccgacctcaggtgatctccccacctgggcctcccaaagtgctgggattacaggcgtaagccaccacgcccagcccatagtagattttaaaatggacatcaggacgcggtggctcacgccagtaatcctagcactttgggaggccgaggtacgtggatcacgaggtcaggggttcgagaccagcgtggccaacacagtgaaaccccatctctactaaaaaaatacaaaacttagccgggcgtggtggcagacgcctgtaatcccacctactcgggaggctgaggcaggacagttgcttgaacctgggaggcacaggttgcagtgagccaaggttgcgccactgcacaccagcctgggcaacagagctagactgcattgaaaaaaaaattttaaaaaaggaacatcaaagccgggcgtagtggctcatgcctgtaatcccagcacttagggagcaaatcactgaaggtcaggagttcaagaccagcctggcctatatggtaaaaccctgtctctaccaaaagtacaaaaattagcggggtgtggtggtacatgcctctaatttcagctacttcggaggctgaggcaggagaattacttggacctggctgggaggcagaggttgcagtgagccatgatggcactaccacactgcagcctgggtgacagagtgagactctgtctcccaaaaaaaaaaaaaaaaaaatagccaaggatggtggcatgcatctgtagtcccatctacttgggaggctgaggcaggagaatcatgccactacattccagcctgagtgatagagtgtgacttggtctcaaaaaacagaaaaagaaatagcaatcagctctttaatgtctccctttatatgagcagtagtcctggccgtgcgcggtggctcacacttgtaatcccagcactttggaaggctgatgcaggcaaatcacctgaagttggtggttcgagaccagcctgaccaacatggagaaaccctgtctctactaaaactacaaaattagctgggtgtggtggcgcatgcctgtaatcccagcaactcaggaggctgaggcaggagaattgcttgaacccgggaagcaaaggttgtggtgagccaagatcacgccattgcactccagcctcggcaacaagagggaaactccgtctcaaaaaatacgtaaataaataataaaaataaaagcacgagtcctattcacgtgtagtcaacacgcatgaccaaattctctcacaggcaccatctgcaggaacatcctattggacaataagaactctgaacatcccttttggccaatataaacattcagaccagggagcctgcatcaggtttttgatgtttttattgtgcagtttgttttatacaatgttttctgtgatctcagtttataaattttcccagtacacattctatgttttatattttacgcacagttaactaggtaactaagggcaatgcatatatataaaattgctctattgcctggtgttatgtaactgtacttgtgacatcataattgcaccctccgacactgttagtcagttcttattgcttttaatgctgtgtattcacttgaactcatatgaagggggtggcctgcccctccacacttgtgggcgtttctcatcaggtggaacgagagacttgagaaaataaagagacacagagacaaagtatagagaaagaaaagcgggcccagggaaccgacgctcagcatacggaggacccacgctggctccagtctctgagtccccttagtatttattaatcattattgggcgtttctcagagaggggaatgtggcaggacaatagggtaatagtagagaggtcagcaggaaaacttgtgaacaaatgtctctgcatcataaacaaggtaaaggaaaaagtgctgtgcttttgatgtgcatatacataaacacctcaatgccttaaagagcagtattgctgccagcatgtctcacctccagccctaaggcggttttcccctatctcagtagatggtatatacaattgggctttacacccagacattcctttgccagggacgagtgggagacagatgccttcctcttatctcaactgcaaagaggccttccttcctctttcactaatcctcctcagcacagaccctttacgggtgtcgggctaggggatggtcaggtctttcccttcccacgaggccatatttcagaatatcacatgggggagaaactttggacaatacctggctttcctaggcagaggtccctgcagacttccacagtgtattgtgtctctgggtgtcaggcctctgagcccaagctaagccatcgtataccctgtgacctgcacatacacatccagatggccggttcctgccttaactgatgacattccaccacaaaagaagtgaaaatggcctgttcctgccttaactgatgacattgtcttgtgaaattccttctcctggctcatcctggctcaaaagctcccccactgagtaccttgtgacccccactctgcccgccagagaacaacccccctttgactgtaattttcctttacctacccaaatcctataaaacggccccacccctatctcccttcactgactctctttttggactcagcccgcctgcacccaggtgaaataaacagccatgttgctccaacaaagcctgtttggtggtctcttcacaaaatttcatgcgcatccatgtgaagagaccaccaaacagactttgtgtgagcaacatggctgtttatttcacctgggtgcaggcgggctgagtccaaaaagagagtcggactttgaatggaaggcgagtctggtttcctaagcagttcctagcttgacttttcccttttgtgtagtgatctggtggccccaaatttattttcctttcacacagcccaaccctcacaccacctctggtctatcttgcttgttctgtgtgattacttttgtgcttttgtcatccactctggatcctagtaagaacaaggccccaaggggagggcggagccagaacgtggggctgtgctgggctcgccccctctgagtggagctcaaccctggcttcacattagagtgcagagcattttgcaaatagagcttttgtgccgctttagcagggattcttattctgatgggatggaacccaccctcagtaatacctgcagtggcgcaggtgcttgtcatctgtgcgcagcattgagcatcgaagctctgtgtcctccatttctgagggctgagctcagcctgtgatccacagagagttgaggggctgtcctgtagggaaaggaaagagagatcagactgttactgtgtctacgtagaaagaagtagacataagagacttccttttgttctgtactaagaaaaattcttctgccttgagatgctgttaatctgtaaccatacccccaaccctgtgctcccagaaatgtgctgtgttgactcaaggtttaatggatttagggctatgcaggttgtgctttgttaagcaaatgcttgaaggcagtatgcttgttaaaagtcatcaccactccctattctcaagtacccggggacacaaaacactgtggaaggctgcaaggacctctgcctaggaaagccaggtattgtccaaggtttctccccatgtgacagtctgaaatatggcctcgtgggaagggaaagacccgaccatcccccagcccgacacccataaatggtctgtgctgtggaggattagtgaaagaggaaggcctctttgcagttgagataagaggaaggcatctgtctcctgctcatccctgggcaatggaatgtctccatgtaaaacccgattgtatgttctattcactgagataggagaaaacggccttagggctggaggtgagacatgcgggcagcaatactgctctttaaggcattgaggtgtttatgtatatgcacatcaaaggcacagcacttttttctttaccttgtttatgatgcagagacatttgttcacaagttttcctgctgacccttccccactattaccctattgttctgccacatccccctctctgagatggtagagatagtgatcaataaatactgagggaactcagagaccagtgccgtcgtgggtcctccgtatgctgagcgccggtcccctgggcccactgttctttctctatactttgtctctttcttttgtcaagagatggcaaaagtgaaaaacaaaacacagaaaaaagtaagaaagcaggaggacaaaaggaactggagaaatgtagagaaaagctagatatacagagacatgaaggacggcaaggtagggagagtggcagcgaagagggaggctcatcagagtgagggagagagggaaggatttggagccagggcagacagagcagagtggtgcttgtgtcaaggagaacagagggagaaacacagcagggaggacacctggggatctggggtgccacagggtcgggacacgggagtgtatcagggaagagagaatttaacagggagaacagaggaggcacagagatgggagaagaggcagaaatagacagagattgaggatgattgaaatattggggagaaggagcaataagaggttaaataagttgtgaggatggagcagaagaggtggaagagaaggaatagagagggaagaaagggataaacggcagaagaggagaggggcacaaaatgaagagcagaatcccaggaagaaagaaaagaaaacaagagctagagagagaaggggagaatgagagagatatacagaattagggagggaagtgcagtaatgaagacagaggggctgggtgcagtggctcaagtctgtaatctccacacttcaggagaatgaggcaagtggattgcttgagtccaggatttcgagaccagcctgggcaacatagtgagaacaccatctctgccaaaaaaaaaataataataataagtaaataaacctgtactcccagctgctctggtggccaagctgggaggatgacttgagcccaggaggtccaggctgcactgagctgagatcatgccactatactgcagcctggtcaacagggcgagagactttgggtttagatgagtgggtgagttcattggatatgattagttgtgacatgttgacttccatgtatataatctaataactaaaaacttgtttatacacatcagattgagaattttaaaattggtgtctataagacgtacattctataaatcttggcatcagaggttatgttccacttggattccctattcagccagagggaagtgacttattcagttgtgaatcactgtcttcccttttcctaggatgaggagggcaaggggtagtgaagtgggaaaaaagtcaccgtctgttattacataatacttttaattaaataatattttgagacagggtacggctctatcacccaggctggagtgcagtgcgtgatctcctctaactgcagccttgacctcttgggctcaagcgatcctcctacctcagccttctgagtagctgggaccacagccatgagccaccaagcccggctagttttcgtatttttttctttttgtagaaacttggtttcactatgtttcccaggctggtctcaaaatcctgggctgaaaggatcctcctgccttggcctcccaaattactgggattacagattacagggatggcccgtggcatctggcctacatagcccccccccctttttttttttgagagggagttttactcttgttgcccaggctggagtgcgatggcatgatgtcagctcaccacaaactccgcttgtcggcttcaagcaattctactgcctcagcctcagtagctgggattacaggcttgcaccaccccacccagctaattttgtgtttttagtagagacgaggtttcatcatgttggtccaggctggtctctaactcccatcctcaagtgatccgctgcctgggcctcccaaagtgctgggattacaggcatgagccaccatgcccagcccatagtagtttttaaaagggacattaggctgcggtggctcacacctgtaatcccagcactttgggagacagaggtgggtggatcacgaggtcaggagttcgagacaagcctggccaacacagtgaaactcaatctctactaaaaaaataccaaaatttccatcctggctaacacggtgaaacccagtctctactaaaaaatacaaaaaattagccgggcgtggtggcgggctcctgtagtcccagctactcaggaggctgaggcaggagaatggcgtgaacccggtaggcggagcttgcagtgagccgagattgcgccactgcactccagcctgggcgacagagcaagactccatctcaaaacaaacaaacaaaaataccaaaattagccaggcgtggtggcagactcctgtaatcccagctactcgggaggctgaggcaggaaaattgcttgaacccaggaggcagaggttgcagtgagccgagattgcgtcactgcacaccagcctgggtaacagatttagacgccgtctgaaaaaaaaaaaaatgaagaaaaagtaaggaatatcaaagctgggcatggtggctcatgcctgtaatcccagcactttgggagcaaatcactgaaggtcatgagttggagactacctgcctggcctacatggtgaaaccccgtctctaccaaaaatacaaaaattagctggccatgtttacacacgcctctaatttcagctactccagaggctgaggcaggagaattacttggacccggctggaaggcagaggttgcagtgagccacgatcgcaccactgccctccagcctgggtgacagagtgagactccgtctgccccccctaaaaaaagaaaaagtagccgagggtggtggcatgcgtctgtagtcccatctactccggaggctgaggcaggagaatctctttaggcaggagaatcatgccacaatagtgcagcctgagtgacagagcatgacttggtctcaaaaaacaaaaaaagaaatagcaatcaactctttgtctccctttataaaagcagtagtcctggccatgtgctgtggctcacacttgtaacgccagcactttggaaggctgatgcgggcgaatcacctgacgtcgggggttggagatcagcctgaccaatatagagaaacctcgtctctataaaactacaaaattagctgggtgtggtggcgcatgcctgtaatcccagctactctggaggctgaggcaggctaattgcttgaacctgggaggcaaaggttgcggtgagccaaggtcacgccattgcactccagcctgggcaacaagagggatactccgtctcaaaaattaaataaataaataaataataaaaataaaagcactgctcctattcacgtatagtcaacacccatggagaaattcttcttttttttttttctcactgtgttgcccagcctgaagtgtagtggtgcgatcttggctcactgcaagctctgcctcccgggttcacgccattctcctgcctcagcctcccgagtagctgggactacaggcgcccgccaccaatcccggctaatttttttgtacttttagtagagatggggtttcaccttggtagccaggatgatctctatctcctgacctcgtgatctgcccgcctcggcctcccaaagtgctgggattacaggcgtgagccaccacgcccagccacccatgaccaaattctctcacagacaccatctgcagaaacatcctattggacaataagaactctgaacatcccttttggccaatataaacattcagaccagggagcctgcatcaggtttttgatgtttttattgtgcaatttgttttatacaatgttttctgtgatctcagtttataaattttcccagtacacattctatgtcttatattttacgcacagttcactagataactaagggcaatacatatatataaaattgctctattgcctggtgttatgtaactgtacctgtgacatcacaattgcaccctctgacactgttagtcagttcttattccttttaatactgtgtatttacttgaacgcatacatcagaaggtactgatcttaacatgtatttcagttcttacagtgtgtgctgattttaagtagaagttgtggcttttttcttgagagagaattgtttagaattctgcaggctgtataaatgtacttatttgcttgctggttttatcatgggttagaatagtttactgattaatatttaagatttcacatatggcttttcagtatatgatatgtaatggaactgacacactgcactagttaaattcagtaagtccctgttctgcatggatataggtaattttaagacaggtattcagaaaaaaattgtattaacatttttttttttttttgagacggagtcttgctctgtcacccaggctggagtgcagtggcacaatctgggctcactgcaatctccgcctcccaggttcaagggattcttgtgcctcagcctcccgagtagctgggactacaggtgaccgccaccacgcctggctgatttttggaatcttttcttatcttctctgtgctatgattatttgacaatacagaatttccattgattttggttactcttacataagcttcttgtggattatttaccaatatagtatattgtatggtcttttagcatttatttgtatacagtagatattctgtaactatgaagaatatatacttttcttctcattgatgtgacagtgatatgtttttttgcaaactgatagaatttagggtcacagtggaaaaacactcctgactttaggcttacacatgtttgtgccctgtcagagttttgtcatgacattggatacaggcttccatagaaatgatttgaaggacatgtaatcgccctttatttatattaaagaatcttactccttttgtattcctaaactttgaagatcatgtttggaaagtttaaaataagtatttttttgtgtgtcatatttacacatttcagtatgatttaccatctggacttaattggaaacgtattggtgtttatattttgtagatatctcttccaaatgcatgatgaaaaaggtgggaagattacttgagccagggagttgaaggctgcagtgagccctgtttttgccaccacactccagcttgggtgagtgagctacaccctatcgcaaataagtcaataaatgagaggtttaattcctcctttgaaaataaagaaagagattttctttcctttcatcccttttcttaggacatttatttagaaaatatgcaaaaatacgaaagttagctgggcatggtcgtgtgcgcttgtaataccagatactccaaaggctgaggcagaagaatagcttccacccagtaggcagaggctgcagtgagccacgatctcgcaactgcaccccagcatgggccacagagaaatactgtcttaaaaataaaataaaagaaaaaagtaaaaaaagaaaaagtaatagatctctttaacaaacgtactgggacaactaactggatatccacatggaaaagaataatgttggatccctatgttacaccatgaaaaattttatttaaaaacggtaaaacaaacaaaaaacaaggccgtgtggggtggctcacatctgtaagccaagcagtttgggaggctgaggagggcggatcacgaagtcaggagatcgagaccatcctggctaacacggtgaaaccccatctctgctaaaaatacaaaaaattagctgggcttcgtggtggtcgcctcaaatccgttactccaaaggctgaggcaggagaatggcgtgaacccggaagttggagcttgcagttagccaaaaccgtgccactgcactccagcctgggcgacagagagagattctgtctcaaaaaaaaaaaaaaaaaaaaaaaaaaaaaaaaagggagggagagacgaggaagggagccctgtgagagggggtgttactttgtcaccaggctggtctggacccccaggttcagcgattctctggccgctgcttcctgagtagctgggacctcaggcttccgcctcgtgcccgcatccctgctgtgtttaagcagcaggtggtgacctcacttctccctttcctgagcactcagtcccgcatcccaggcggaggccctagggaagtctctgaagctgagcacagggtggactctccctcctgaatgaatggcgaatagaaagagagaggatttctgttctgttctgtgggccatcagcatgaaatcatatgttcctcccaggcagggctttgcatttcacattttagtttgcatgcccgttccagacaattccagggttttgaatcatgcctcaaccttcctggccgctctcccctccaaacacccaaaaaacagaggagctgcctgccaggccaagtgatgcacaggtcccgccccggccccgccctctgccggttctaaagggcaaggtctctccgcctcgcgctccgaccctaccccgcccaggacccgccaaactgttcgcgggccccgcccaggcctggcttctgtcctgcgcgcgcaaaccaggtggcgtatcgcttggagtgaaggtcctaccgcggcatgtgagtttcgctctgtgttgtgttaagtctgcgcttcccaggtccccggcgcttctgtccctaggactttgggtccccacggacctggaaattctcgcttgtcttcattcacatagagcaaattgagatgtccccgtaagagtccgggagttgcttccttttgggtttgaagtcgtccggaggctggtccagtccctggtctttctgctgtagggcagtgtatacacttctatagcgtaattttcctgctcaaaacctttttctgactctcccgccccgtgcttcttaaagtcctcacccgcgaggtggattcccgccctgggcgcctcccaggctcggcccctggagcacagcgccccgggcccagtcctggggaggctgcgtcttctgcctggtcctggaatcctgcaggtgtcacccttgtcttaaggcgccgtcgccccctacgtccctcctcgtgccgggccctgctgctcccgtagtcttccctctgcagtcaccgcttcccctgaaccagcattgggcaggtcccaggggcttgtcctttgacccgggatattcttgcctgcccagttccaccccccggaaaatgcgcttctccgcgatgcaggagtcttactccaaacccgcagagttttgctggtggcaaggagaaccgagggagaaacacagcagggaggacaccgggggatctggggtgctagagagtggggacaggggggtataacagggaagagagaatttaacagggagagcagaggagacgcagagataagaggcggtaatatatagagattgaggacgatcgaaagattggggggaagggcaacaagaggttaaataaggaccgggcgcggtggcttatgcctgtaatcccagcagttttggaggctgaagcgggcagatcacctgaggtcccgagttcgagaccagcctgtccaacatggagaaaccccgtccctactaaaaatgcaaaattagccgggcgcggttgcacatgcctgtaacgccagctattagggaggctgaagctggagaatcgcttgaacctgggaggcggaggttgtggtgagccgagatctcaccatttcactccagcctgggcaacaagagcaaaactccgtccaaaaaaaaaaagtggttaaataagttgtgaggatggagcagaagaggtggaagagaagtaatagagggaagaatggaataaatagcaggagaggagaggggtacaaaatgagcagaatcccagggaaaaagacaagaaaacaagagctagagagaaggggagaatgagagatgtgtaaagaattagggagggaagcacagtaatgaagaaagagtggctgggcgcagtggctcaagcctgtaatcccagcactttaggagactgaggcagagggattgcttgagtccaggagttcaagactagcctaggcaaaatagtgagacccgccatcgctgtcaaaaaaaaaagaaaaaaaaatttaacggggcatgatagtgtagacctgtaatttcagctactctgtaggcagaggctggaggatcacttgagcccaggagctccaggctgctgtgagcagagatcatgccactgtactccagcctggtcaaaagagcaagaccctgtcttaaaagaaaaaaagggttggggactttggatacagatgagtgtgtgagttcattggatatgattagttgtgacatgttgacttctgtctatataatctaataacttgtctaaattatacagatgagtttgagaattttaaaagtcctatctgtgagtcatgtacattctataaatcttggtatcagaggttagcttccacttggaatccctattcagcccgcgggcagtgacattcagttgtgagtcactctcttcccttttcccagggtggggtaggaagtggggcagtgatgtggaaaaaaaaatcactttctgttattatgtaatacttttaattaattaattaatattttgagacagggtctggccctattgcccaggcaggagtacaatggtgttatctactctaactgaagcctcgacctcctaggctcaagcaatcctcctccctcagtctcctgagtagctgagaccactggtgtgagacaccaagcccagctagttgttttttttttctttgtttgtttttttgtagaaacagggtttcagtatgtttcccggggtggtctcaaaatcctgggctcaaaggttcctcctgtcttggccttgcaaagtactgggattacagggatgagccaccgcgcccagcctacatactaattattattagtagtagtagttttttgaggtggagtttcactcctgttgcccaggctggagtgcaagggcacgatcttggctaatgactctctgtgcctttagagttgaagcgattctcctgcgatactaccccctgagtagctgggattacaggcatgcgccaccatgccccgctaattttggattaggaggccgaggcaggagaatcacttgaacccaggaggcagaggttgtggtgagctgagatcgcaccattgtacttcagcgtgggcaataagagcgaatctctgtctcaaaaaaaccaaaaaagaatggagcaaaacaggagaggggtataaaatgagcagaagcccagggggaaatgcagaaaagaaacagatggagagagaaagtgaaaaagggctatgtataaaatgatggagggaagcagtaatgaagatgaagggggaccctgagtgcagatgagcggtgagttgattggatgtgatgatgaagtgatgacacgttgttttctctgtttataatgtaacaaatttaaaattagtttaaattatacagatgagaatgagagttgccaaactcctgtgtctaagtgtggtgcattttataatgatggcgtcagaggcagcttccctctgcaacccctcttcagccagaggacagtgacttgactcattcgttgtggatcaccctcttcccttttcatggctggggtcgggagtgggggaagagaagtagggtaagaagtgactgactctgttactatatggaacgtgatgaaaggagtattaaagtgctttttttctctttttgtaattggtttccttttttctagttcctcctcatttaattagtttagttgtctttttgtttttctttttgagatggagtctctctctgtcacgcaggctggagtggagtggagcgatctggactcactgtaacctctgcctcccgggttcaaggaattctctgcctcagcctcccgagcagctgggattataggcgcccacaaccacacctgtctgatttttgtatttttagtagagacaggattcaccatcttggcaagatggttcttgaactcatgacctcgtgatccaccctcgtcggcctcccaaagtgctgcgattacaggcatgagccaccacgctcggcctcatttgttgttatttatttatttatttatttgagacagagtctcgctctgtcacccaggctggagtgcagtggcgcaatctcggctcactgcaagctccgcctcccgggttcacgccattctcctgcctcagcctcccgagtagctgggactacatgcgcccgccaccgcgcccagctaattttttgtatttttagtagagacggggtgtcaccatgttagccaggatggtctcgatctcctgacctcgtgatccgcccgcctcagcctcccaaagtgctgggattacaggcgtgagccaccgcgctcagcctcattagttgttatttatttatttatttgagacagagtctcgctctgtcacccaggctggagtgcaatggcgcaatctcggtcactgcaaccttcgcctctggggttcatgtgattctcctgcctcagcctcctaagtagttatgattacaggcacgcagcaccatggccggctaattttgtattttcagtagaaatggggtttctccatcttggtcaggctggtcttgaacacctgacctcaggtgatcctcctgcttcagcttcccaaggtgctgggattacaggcatgagccgccgcgcccagcctttaatttttatttttttgagacactcttgctgttgtccaggctggagtgcagtggcaggatcacatctcagtgccgtagcaacctcctgggctcaagtgattttcccacctcagcctccggagtagctggggccacaggcacgccccacgaggcctggctattgtttagatatatatatttatttgttgagactctctgtcacccaggctggagtgcagtggcacgatttcgtctcactgcaacctccgcctcccagggtcaagcgattctcctgcctcagcctcctgagtagctgggattacagacgcccaccaccctcccagctaatgtttgtacttttagtagagacagatttcagcatgttggccaggctggtctcaaactcctgacttcatgatccgcccaccttggcctcccaaagtgcttgtgcaccactatgccctgctaattttagtatttttggtagagacatagtttctccatgttggccaggcaggtctcgaactgctaaccttgtggtggtcttcctgccctggcctcccaaagtgctgggattataggtgtgagtcaccatgcccggccttattgttttcaaagtatgatatattttcaactatttctcctttgagccaagatttcattacatctatattttttgaacattttaaaattgtttctctgtgaaattgtgttcagtttacattgaggtctgtttgctttctagtctttatcatatatcgaaaacattttctactatgtgatatatgatgttaggttgtttcagtgtgtacttgataatgatatcaaggaccttttttctttatcctaacatgaaaatttagttaaagtagcctattccattttcttttcttatgtcatctgaaaaaatggttatctgtgagcttctaagtaagtgtccccctcaagtccctctggtccataatattctctacagatgttgaaggatgggctggattgacttggaaccttggtttagcagagcccatgtgttcatgagaaaagcatttgctcagatctcatttctacagctgcctctttttcagtgttttaaacacctattgctgtgtgtgcacatggtgtgttttgcacatttttctgggagtgagtaatgatatgtttgggattgatgccatcagaaccttacaactcgaaagaagtttcctttgctcaggtatataagatggtcctggaatttttgtttgtttgtttttctttgagatggagtctcgctctgtcgcccaggctggagtgcagtgacatgatctcagctctctgcaacctccacctctcgggttcaagcaattcttttgcctcagcctcccgagtagcagagactacaggtgcccaccaccacgcctggctaatgtgtgttttttttttttttttttttgagatggagtctcactctgtcgcccaggagggagtgcagtggcgcaatctcctctcactgcaagctctgcctccttggttcatgccattctcctgcctcagcctccggagtagctgggactacaggcacccaccaccacacccagagaattttttgcatttttagtagagacgggcattcaccgtgttagccagaatggtaatttgtgtatttttagtagagacgtgatgtcaccatattggccaggatggtcttgaactcctgaccttgtgatttgcccactttggcctgccaaaatgatgggattacaggaatgagccacctcgcctggccgctttttttttttttttttgtaagacagagtgtcaccctatcacccaggctggaatgcagtggaacaatcttggatcactgcaacctctgcctcccgggctcaagtgatcttgcgtcagcctcccaagtagctggaaccacagatgcacgccacgatgcctggctaattttttgtatttttgttagagatggggtttactatgttgcccgtgttggtctcagacttcttggctcaagtgattggcctgcctcaactacccaaagtgttgggatttcaagggtgggtcaccattcctggctggtcttggaattttctagaggaggaagaccaaggcagcctattggccctttcaggccatcacattggaatcagccacacctccttcctcctcacctcagagcttctcaggataacttggtgaaatgtctcccgctgtgagccttagtgagcccacctgtaacatagaggtgaggaataagatcagaaaagctcagtcagtgacactgacccctgaaacgactgacaaaatacagtgtgtgacttttcttctgggagaggataatggtcatttttaactcaaatttcaaatgaattccagttctccaagatgagcaaaaacaggggattagactcaaatcaccttgaaggttatcatctcacagctttcacccacctacacgactccatgtcccctgcaggcctcaaccctgagctctacaatcctgtgtccagtagtctcctcagctctctcctgggacatcaaacaggcatccccaccttcagctgtccataagtgacttcctaaatccccaaacacattcccttgcagtctgcacatctcagatgagagtgaatgtgtacttccgaaaacttagctgaacttgacagcacatattttaaatatgggaaatacattacattatttgtaagtgttgtaatttataatacatagagaaacgtacatgtatatgtgaaaagagtgagaagatacatcacttccaaatcgtttttttttttttgagatgaattttcactcttatggctgaggctggagtgcaatgccatgatatcagctcactgcaacctctgtctcctgggatcaagggattctcctgcctcagactcccgagtagctgggatcacaatcgactttcaaaatgcttttgggttgtgggagaaaaatgtttgaagaccatgtccctatgggtctgtgcccccaggacctctctgacctcatctcctacctgtgccctcctctcttccactgttccagccccacgggccgctttccttttcctggggctgaggttgctcctgtctcagggccttcacttgagctgtccctctctctaggatgctcttcccctcagctgcaagtgacaagcagcctttctttcctaggtccttgttctgatatcatcttctccgggtctcctttgtgatctcccacagccctcattcgacactgcggctgtgaaatcagaaaatcttacagagatctcagttaatttagaaagtttattttgcccaaggtggtcggcgcagagcttaattttatacattttatggagacatgagacatcaatcaatatatgtaagaagtacgttggtttggtctgggaaggtgggagaactttaaacaaaggcaggaagacttgaagcagggaaggggcttttaggtcacagagaactgaggcacaaatggttgcaatcttttgagtttccttttttttttttttttgagatgaagtcccattttgtcacccaggctggagtgcagtggcacgatcttggctcactgcaacctctccctcctgggttcaagtgattctcctccctcagcttcccaagtagatgcccagatcatttttgtatttttagtagagatgtcttttcaccatgttggctgggacggtgtcgacctcttgaccccaagtgatctgccttcctcggcctcccacagtgctgggattacagtcctgagccactatgctgggtctttcttttgagtttgattagcctttcaaaggaggtactcagataggcatgtatgtcagggagcagaggggtgactttgaatagaaggggagtctggttccctaagcagttcccagcttgacttttcccttttgcttagtgattttgggccccaagatttattttcctctggtccacattgactgttttgtgtgactttttttttttttttttttgagatagagtcttgctctgtcacccaggctggagtgcagtggtgggatctcggctcactgcaacctctgtctcctggcttcaagcaattctcctgcctcagcctcctgaatagctgggattatgggcacccgctaccatgcccagctaatttttgtacttttagtagagaaagcatttcgccatgttggccagtctggtcttgaagtcctgaccctgtgatccagccgcctcggcctcccaaagtgctgggattataggcgagagcccctgcgtctggcctctttgtgattatttttgtgcctttgtcatccactgtctggatcctggtgagaacttggccccaagcggagggcagagccagaacgtggggctgtgctgggctcgccccctctgagtggagctcaaccctggcttcacattagagtgcggagcattttgcaaatagagcttttgtgccgctttagcagggattcttattctgacgggatggaacccaccctcagtaatacctgcagtggcgcaggtgcttgtcatctgtgtgcagcattgagcatggaagctctgagtcctgcatttctgagggctgagctcagcctgtgatccacagagaggtgaggggctgtcctctggatgcggtttgatcagggatgggtctgtgccctgaaggagagatcagtccagcccagctccccactgctgcctcgtgtgtggtggctgctccaggaggggggcgagatctgaagaccagggtcaaacatacacttataggtcttcctgtgggactttcttatgtctgcatgatctctggtgcagtgggcagtggggggggcttctttgtacagggtgatgtctccccgttcctgtgtttttatcacaggaagggagtgagtcatatctaacctgaagtcttatttttcttccacatacaggattgatttctaaagactcatgttacatgaggaagcagctcagaagaggaaaggaaaggagccaggcatggctcttcctcaggtgaagtgatattcctctgtggattaatctgtctctttcctttctgaagtgtagtagtattatattgtattgtagtaatgtattgtaacagccagtcttttctgagtctgaagcattttgcctgacacgtttgcttgcactcacccatgcctgccctcagttcctctcatttgctcaaaagaattccatctcctgtgacccagtgacatgaacttgggaagaggctccactgggcatggtcctgggaagggctcacacccagacatggattaacatggggtgtgggcccgttgatgtcattgctgctgggcagcctggattgttcaggggccatatctggatgtcagctctttgtggaccagattagagaaactgcatatgaaatacgtatgttaatgtgcccaggtatgtggcaaattctgggaaaggagacgaataaggagaggtattttgtatctcatttggtaatgcatttgaagccacactagtagatcaagatgtctctgtctccaaactttttgttttgttttaagagacaggatgttggtccaggtgggatggctcacacttgtaatcacagcactttgggaggccaaggcaggaagatcacttgaggtcaggagttcaagaccagcctggccaacatggtgaaaccccatctctactaaaaatacaaaaattagctgtgtgtggcggtgcatgcctgtaatctcagctacttaggagacggaggcaggagaatcgcttgagcccaggaggtggaggttaccatacactgaaattttgccactgcactccagcctgggaaacggagcaagactctgtctcaaaagaaaaagagagggagagagaaggtgtcgctctgtggcttagttctggagtacaatggcacaattcagagtttacagcagcctcaaactcctgggctcaactaatccctcctttagactcccaaagagcctgagtgataggcatgggtcaccatatgtatgtatgtattttaagatggagtctcgctcagtcaccaaagctggagtgcaatgtcaggatctcagctcactgcatcctctccctctgggtttcaagcaattcttctgcctcagcctcctgagttgctgggactacaggatgcaccaccacacccagctagtttttgtacttttagttgggacagggtttcattatgttctttaggctggtctcaaactcctgaccttgtgatctgcctgtcttggactccccaggtgctgggattaaaggtgtgcaccaccatgtctggccttattttttatattgtatttttattttgttgtccaggctggagtgcagtaatgcaatcatagcttgctacagccttgatatcctggcctccagtgatcctcccctcttggcctcccaaattgctggcattccaaatgggagacagccagcccggctggactctgcactttttttgagatggagtctctctctgttgcccaggttgtattgcagtggcgggatctcagctcactgcaacctctgccttccggcttcaagcaattcttttgcctcaacctctggagtatctgggattacaggcattcgctgtcacgcctggctaagttttttgtatttttatagagatatggtttcagcatgttcccaggctggtcttgaattcctgacctcgtgatccactcacctcggtctcccaagtgctgggattacaggcatgagccactgagactgaccaatcatgatagtttttagattcggacttttctttgaaagccatttgactttgtcctctctgaaacaccacttgtatcttagctcatctagagactaaatatcagctcgtatgttgaacataatatctgacatgtctgtagagaaaaccctgtgtttgcttttttttttttttttgagatggagtcttgctctgttgccaggctaaagtgcagtggtgcaatctcagctcactgcaacctccgcctcccggattcaagcgatcctcctgcctcagcctcttgagtagctgggagtacaggtccacaccacgacacccagctaatttttgtatttttattagagacatggttttgccatgttggccaggatggtctcgatttcttgaccacattatctgcccacattggtctcccaaaatgttgggattacaggtgagagccaccgcctggcattgctttttttttttaacatggagtgtcagtctgttgcccaggatggagggcagtggtgcgatcttggctcactgcggcctccatctcctgacttcaagtgattctcctgcctcagcctcctgtgtagctgggattacaggagcctgccacaatgcccgtctaatttttatatttttagtggagacaggtttccaccacattggccagggtggtctcgaactcttgaactcaaataatctgcccaccttggcctcccgaagcattggtattacaagcgtgaaccaccatgcccagccctgtgtttcctttttatttatatagtttttatattgtccataaaatcgagacttccatagcgacttatgggatcttaaaatctttcaaggaaaagtacaataaaatgcaactattgagaaaaaaaattcaaaaataccttaacgtggttttgtcacaacacagtctttgatcaaagaaatacttattttctcttttctcatttcctgtgaaggtgataactcaatcctccataatgttttgttgaaatgtgtgtttcattttagggacgcttgactttcagggatgtggctatagaattctcattggcagagtggaaattcctgaaccctgcgcagagggctttgtacagggaagtgatgttggagaactacaggaacctggaggctgtgggtgaggaaaatgtccctgcagacatgaggagtctgctcttgtctgtcttggctcttcctggttttgtattctcttttgtgattttgccccatacgtggtttttttgtttgattgtttgtttggtttgagatggatctttgctcttgtttcccaggctggagagcaatggtatatcggctcatcataacctccaccttccgggttcaagtgattctcctgcctcagcctcccgaggggctgggattataggcatgcgccaccacgcccagctaactttgtatttttagtagagatggggtttctccatgttggtcaggctcgtctctaactcccgacctcaggtgatccgcccaccttggcctcccaaagtgctgggattacaggcgtgagccaccatgcccagctcattctggtttttgaggagcatcacagaagcgtctctcactggcactgtgacaatgttcatcccataaactaatgatcatcttctctaagcagcagtcagtggtgttgaaatttctcctagcggggacatcatttgggctcacagcctcatatgtatgaggctgttgactgaactcttgttcatttcacatttttcacaccaatatatgtcattgttcattttttgtttgtttgtttgttttttgtttttgtttttgagacagtctcgctctttcacccaggccgactgcagtggcacgatctcggctcactgtaagctccgcctcccgggttcaagccattcttctgcctcagcctcctgagtagctgggattacaggtgcccgccaccatgcccagctagtttttttttgtatttttagtagagacggggtttcaccgtgttagccaagatgctctcgatctcctgaccttgtgatccactctcctcgacctcccaaagtgctgggattacaggcgtgagccactgcgcctggcccattgttcatttttgacaagaaaacctatgttcagtttgttgtagggtcaaccctgtaagagatatggttttcatcaatcttatttagggagcttgtgaggttgaatgaggtttccatggtttagttctactgtcatttccttcagacacagtggctttcaacttgttagtttctatgttgtttttttttttgagtcagagtctcactctgtttccctggcttgagtgcagtggcttgatcttggctcactgcaccctccacctattggattcaagtgattctcctgcctcagcctcttgagtggctgggattacaggcatgtgtcaccacaacctagtaatttttggtagttctattacagatggcagtttcaccatgttggctaggcttcttttgatagcctggcctgacgtgattcacttgcctcggattccaaactgctgggattacagtcatgagccaccacccctggccccatccgagtttgtttttaaggctgaataatactccattttatgtgtataccacattttcctcatgtatttatctgtcgatggatatctgggttggttttttctctttactattatgaacaatactaccaggctgggtgcggtggcccatgcctgtaatcccagcactttggaaggctgaggtgggtgaatcacctgaggtcaggagttcgagaccagcctggccaacatggtgaaaccacatctctattaaaagtacagtttctttttttttttttttttttttttaagatggagtattgctctgtcacccaggctggagtgcagtggtgcaatttcagcttagtgcaacctccacctcccaggtcaggcaatctcctacctcagccttctgagtagctgaaattacagatgttcaccaccatgcccggctaatacttgtttgtatttttttagtggagacagtgtttcaccatactgtcctggctggtcttgaactgctgatctcttgatccacctgcccattatgcctggcgcaagcctggctaatttttgtatttttagtagaggtggagtttctacttgtgattcatccacctgctttttaaaacaagtgaatattattagatggcttcatatattataagttttacaggacagactctaaacttcctttgtttaataagatttgtcggcctttggtgatgttgatgatgagatgccccttttcctatctcactcatttcatcgttctgttagaaatagcttagactggccagccgcagtggcttatgcctctatttccagcactttgaaaggctgaggtgggtagatggcttgaggtcaggagtttgagaccagtcgggcaaacataatgaaaccttgaatctactaaattaaaaaaaactggatggtcgtgatggctcacgcctataatcccaatattttgggaggccgagatgggtggatcacttgaggtcagaagttcgagaccagcctggccaacatggtgaaaccccatatctagtaaaaacacaaaaattagctgggcatgttggtatgcacctgtaatcccagcttcttgagaggctgagatgggagaatcacttgaacctgggaggtggatggtgcagtgagccatgatcacgccactgcactccagcctgtatgacagagttagattccgtttgccacaaaacaaaacaaaaaaattagccaggcatggtggcatgtgtctgtagtcccagctactcacgaggctgaggcacgagactctctttaggtaggagaatcgtgccactgcactccagcctgggtgatgaagcatgactcagtctcaaaaacagacaaaaaaagaaatagctggaactggaaagcttaagacatagaaatttatttctcattaatctggaaagtgggaaatccaagagcaagatgtcagctagattggctcctggtgagagccttcttcgtggtttagcccagccgtcttcctgctgtgtcctgacatgggggaaagaggagcaggcaatgagctctttactgtctctttttataaatcactagtcctggctggacgagctggctcatgagtgtaatcccagcactttgggaggctgagacagccaaatcacatgaggtcgggagtttgagaccagcctgaccaacatggagaaaccacatctctactaaaactacaaaattagccgggagtggtggcacatgcctgtaatcccagctactcgggtggctgagacaggagactcacttgaatctgggaggcggaggttatggtgagccgagatcataccattgctctccagcctgggcaacaacagtgaaactctgaatcaaaaataaataaagaggcggggcacggtggctcatgcctgtaatcccagcactttgggaggccgcgcagtgcagatcacgaagtcaaaagatcgagaccatcctggccaacatggtgaaaccccattgctactaataatataaaaattttctgtgcgtggtggtgcatgcctatagtcccagctacttgggaggctgaggcaggagaatcacttgaacccgggaggcaaagttgcagtgagccgagactgtaccactgcactccagcctgggtgacagagcaagactccatcacaaaagaaatagagagagagagaaagagaaagtgaaagagagaaaaagaaagaaagatattaaaagccttagtcctattcacaattagtcaacacccatgaccaaattctctaaaaggccccatctgcaggaacatcctattggtcctattggtccactatcagatgatagtggaccgagcgcggtggctctcgcctgtaatcctagcactttgggaggccgaggtgggtggatcacctgaggctaggagttcaagaccaacttaaccaacaggagaaaccccatctctactaaaaatacaaaattatcgagtgtggtggtgaatgcctgtaatcccagctactgaggaggctgaggcaggagaattgcttcaacccaggaggcataggttgtggtgagctgatattgcatcattgcactgcagcctgggcaacaagagtggaactctgtctcaaaaaaaaaaaaaaagaaatctgataatcgcttttagccagtacgaacataactgtagttgtgacctcataattgcacttttctacactattagtcaattttttttttttttttttttttttttgagatggagtcctgccctgtcacccaggctggagtgcaatggcacgatctcggctcactgcaacctccggctcctgggttcaaaagattcttttgcctcagcctccaaagtagctgagataacaggcacccgccaccacacccggctgatgttttggtgttcttagtagagatgcagtttccccatgttggccagcctgttctcgaactcctgacctcgtgctccacttgcctcagcctcccaaggtgctgggattacaggttgtgagtcgtcgtgcccagccgttagtcagttcttattccttataatgctgtgtattttcttgacctcatacatcagaaggtagtgatcttaacatgtatttcagttcttatattgtgtgctggtggttaagtagatgttgtggcttttttcttaagagggaattgtttagaattctgcaggctgtataaatgtacttatttgcttgctggttttatcatgggttacaatattttattaattaatttttataattttgcatatggcttttcagtatgtggtatgcaatataactgacacactccactcgttaatgtcaaaagtgccaccaggtgcagtggctcacaccggcaatcccagaaatttgggaggccaaagggggtggagaccagcctggccaacatggtgaaacccggtctctaccaaaaacacacaaactagccagtcatagtggtgtgtgcctgtaatcccaggtacttaagaggctgaggcaggagaatcacttcaacccagcaggcagaggttgcagtgagctgagatggcaccatggcacttcaagctggaatgcaagactgtctcaaaaaaataaaactacaaaaaatggtttcaaaagtcactatgtgcctgttctgtgtggatatatgtaattttatgacatttattgagaaaagtattgtattaactttttttttcttttttttccttttttttttctgtttgaggcatagtctcactttgttgcccagtgtggagtgcagtggtgacatcttggctcactgcaacctctgcctccccggttcaagtgattcttgtgcctcagcctcctgagtaactgtgactacaggcacgggccagcacacctggctaatttttgtaatcttttcttatcttctcagtgctataattgtttgataatacagaatttccattgcttttggttatccttacatgagcttgttgtggattatttaccaatatagtatattgtgtggtgttttttttttgcatttatttgtacacagtaaatatggtttaaatatgaagagtatatatttttctcttccttgatgtgacagtgatatgttttttgcaaactgtgatacactgtagggtcacagtggaaaaatactccttactttaggcttacacatgtttgtgccctgtcagtgttttgtcatgatataggaaataagcttttatagacttgatttgaaggacatgtaattgtctgttatttattaaagaatcttactacttttgtgttcgtaaactttgaagatcatgtttgggaagtttaaaataagtattttttattgtgtcatatttacacacttcagtatgatttaccatctgcacttaattgcaaacgtattggtgtttatattttgtagatatctcttccaaacgcatgatgaaggaggtcttgtcaacagggcaaggcaatacagaagtgatccacacagggatgttgcaaagacatgaaagttatcacactggagatttttgcttccaggaaattgaaaaagatattcatgactttgagtttcagtcacaaaaagatgaaagaaatggccatgaagcatccatgccaaaaatcaaagagttgatgggtagcacagaccgacatgatcaaaggcatgctggaaacaagcctattaaagatcagcttggattaagctttcatttgcatcttcctgaactccacatatttcagcccgaagagaaaattgctaatcaagtggagaagtctgtcaacgatgcttcctcaatttcaacatcccaaagaatttcttgtaggcctgaaacacatactcctaataactatgggaataattttttccattcatcattactcacacaaaaacaggaagtacacatgagagaaaaatctttccaatgtaatgagactggcgaagcctttaattgtagctcatttgtaaggaaacatcagataatccatttaggagaaaaacaatataaatttgatatatgtggcaaagtctttaatgagaagcgataccttgcacgccatcgtagatgtcacactagtgagaaaccttacaagtgtaatgaatgtggaaagtccttcagttacaagtcatccctgacatgccatcgtagatgtcacactggtgagaaaccttacaagtgtaatgaatgtggaaagtccttcagttacaagtcatcccttacatgccatcataggtgtcacactggtgagaaaccttacaagtgtaatgaatgtggaaagtccttcagttacaagtcatcccttagatgccatcgtagacttcatactggaataaaaccttacaagtgtaatgagtgtggcaagatgtttggtcaaaattcaacccttgtaattcataaggcaattcatactggagagaaaccttacaagtgtaatgaatgtggcaaggcttttaatcaacaatcacacctttcacgtcatcatagacttcatactggagagaaaccttacaagtgtaatgactgtggtaaggcttttattcatcagtcaagccttgcacgtcatcatagacttcatactggagagaaatcttacaaatgtgaagaatgtgacagagttttcagtcagaaatcaaaccttgagagacacaagataattcatactggagagaaaccttacaagtgtaatgagtgtcacaagaccttcagtcacaggtcatctcttccatgccatcgtagacttcatagtggtgagaaaccttacaagtgtaatgaatgtgggaagacttttaatgtacagtcacacctttcacgtcatcatagacttcatactggagagaaaccttacaaatgtaaggtttgtgacaaggctttcatgtgccattcttatctggcaaaccatactagaattcatagcggagagaaaccttacaagtgtaatgagtgtggtaaggctcacaatcacttgattgattcatcaatcaagccttgcatgtcatcatagacttcatactggagagaaaccttacaaatgtgaagcatgtgacaaagttttcagtcacagatcacgccttaaaagacataggagaattcatactggagagaaaccttacaagtgtaatgagtgtggcaaagcctttagtgaccagtcaacacttaccatcaggccattcatggtgtagggaaacttgactaatgtaatgattgtcacaaagtcttcagtaacgctacaacgattgcaaatcattggagaatccataatgaagagagatcttccgagtgtaataaatgtggcaaatttttcagacatcgttcataccttgcagttcatcagtgaactcatactggagagaaaccttacaaatgtcatgactgtggcaaggtcttcagtcaagcttcatcctatgcaaaacataggagaattcatgcaggagagaaatgtcacaagtgtgatgagtgttgcaaagcctttacttcatgttcacacctcattagacatcagagaatccctactggagagaaatcttacaaatgtcatcagtgtggcaaggtcttcagtccgaggtcactccttgcagaacatcagaaaattcatttttgagataactgttcccaatgcagtgagtatagcaaaccatcaagcattaattgacattggagtcaattcagcattgacttgagtttgtgttgacttaacattgagttcaagccttaattgacatgcaggtgtttatgataagaggattgggccaggtgcagtggatcacgcctgtaatcccagcacattgggaggccaaggcacataggtcacttgaggtcaagagtttgaaacaagcatggccaagagatgtgagccagttttcccagcctgtttattattattttttgagatggagtgttgctcttgctgcccaggctagagtgcaatggtgcgatcttgactcacagcaacctccgcctcctgggttcaagcgattcctctgcctcagcctccctagttgctgggattacaggtatatgccacgacgcctggctaattttttgtatttttagtagggaaagggtttctccatgttggtcaggctggtctcaaactcccgatctcaggtgatccgcccacctcagcctcccaaagtgatgagattacaggcatatgccaccgcgcctggcattgtttcttcttttccttttttttttttttttttttttttgagatagtactttttaaagagatagtacttttttgagatagtacttttttaaagggatataccatagtagttttaaaagggatatcaggctgggtgtggcagctcacgccggtaatcccagcactttgggaggccaaggcaggcagataacaaagtcaggagattgagaccgtcctggctaacacggtgaaacctcgtctctactaaaaatacaaaaacttagccgggcatggtggtgggcacctgtagtctcagctactcagggggctgaggctggacaatggtgtgaacccaggaggcggtgcttgcagggagccgagatcgtgccactgcactccaggctgggcgacagagtgagagtctgtctcaaaaaaaaaaaaaaaaagatatcaaacccggggtgtctcatcccacagcactttggaagactgaagtgagtggatcatctaagatcagagttcaagagcaccctggctaacatggtgaaaccccatctctactaaaaatacaaaagttagccaggggtgggggtgtgcacctttagttccagctacttgggacactgaggcatgagaatcacttaaacctgggaggtagaggttacagcgaatcaaaaccgtgccactgtactgcagcgaggttggcagagtgagtctccatctcaaacaaacaaatgaaaaaaacagacatcaaaaatgcttttgttctcgttgtgtcatagacttcccttttttttccttctggttcctcttcagttctctatttattttttcttttttgcagattgagtttgagatatatcttagttttaatagttttatttcttaacacataatgacttctgaaagatgcctttgcagcatcctgtaatcagctcacatcattcgtttctgtacttgtatattttccagttgttttccggttgaccccaaaattcgtgagatttttttcctacaacaatttcaaaagagttgctgtttgaaattagttgcatccagttcagatcgaggtctgcatgctttctagtctttgttatttattggaaggctgtggtacctactacttaagtttgattgttgcagtgtgtacttggtaaagatgtcagtgaccttttaaataaacatcaaaatgtagtttaagcagttagtctgtttttcagttttctttccttatgtcattttttaaaatcttgagctgggagctatttattgtgtgtttccctcaaggccctgtggtccattctggaaaaatgttgaaacatgggctggagtggcatagagcgctgctccaaaagcacccatgtattcttttcttttttggaaatggagtctcgctctgtcagcttggatggagtgcagtggtgcgatctcagctcactgcaacctctacctccttggatcaagtgatgctcctgcctcagtctcctgaggagctggaattacaggcacccaccagcacacccagctagtttttgtatttttagtagagacagggtttcaccatgtttgtcaggctggtctcaaactcctgacctcgcgatccacccgactcagcctcccactgtgatgggattacaggcatgagctaccacgtcgagactcttttttttttttttttttagatggagttttgcttttgttgctgaggctggagtgcaatggtgcgatctggtgtcactccaatgtcttcctcctgggttcaagtgatttctcctgcctcatcctactgagtagttgggattacaggtgccctccaccactcccggctcattttttgcatttttagtagagacagggtttcatcatgttggcaggctggtcttgaactcctgacttcaggtgatctgcccacctcgacctcccaaaatgctaggattacaagcgtgagccattgtgcctgaccactcatgtattcttgattgaaataatttgcttatttcttagttctacagctgaccctctttcactgtttccaaggtcaatagctgtgtgttcacacttctgcattttataaatgttcctgtgagttttttgtaaggaagaattaactgtcaggaatcaatgtcatcagaaccttgcaaaagaagtttctttagcccaggtttgtgaaagaggtttctctaattttcaaggatgggggtgataagagcaacctttgccattagcccttccaggaccccatgtaagactttagacaccttctcactcatctcagaccttctcagggtaacttggtgaaaatgtcttccgatctgagccccagtgagcctccctgcaacttggcgacgaggggcttgaccagaaaaggtcaacccgagtgtccctgaccgttgaaatgattggcaaaatggagtgcgtgtctgggtgtggcttttttttttttgaggagtgcccagttgtgattagaattttcaatgggatgcagtgccctaaaaatgaaaaacaaaagcagaagaatggaagaaatagaggtagactcagacacagagaccatcttcaaggcctttctctgtatgaggacatcacagcaaaatctaaagcaggtcacgtcaatccctggcagggaaccctccaccggcttcccgtgttccccaggacaaaagcccaacccctcactgtggctccacagccccgtgtgcagggcccctgccagtgtccagcctcctcctggcagcttgccctcatctcatgactccctctgccccagtcacatttgcttttctcttttcccaaacatcaaaacccttcctgtctcaggtcattgtccctgctcttaccctatgtaccctgtccctttctcctccttcaggtctaggctcagagctctctcccatgccctcccacccctggtctcaagctcctgagctcaagtgatctacccacctcggcctcctagagtgctgggatgacaggcatgagccactgcaaccagcctctgcatggggtttcctcaactttaggtctgtgccctgaaggggagctcattccagcccagttcccaactgctgcagcatgtgtgtgtgggcttctccagaaggggagccagagtttccctgtaggagtttatcctccatggtgaggagggccgcaggggggactgtatttgctcagggtgaggtctcctttgtgtcaggcctctgagcccaagctaagccatcgtatcccctgtcacctgcacgtatacatccagatggcctgaagcaactgaagatccacgaaagaagtgaaaatacccttaagtgatgacattccaccattgtgatttatttctgcaccatcttgactgatcaatgtgctttgtaatctcccccacccttcagaaggctctttgtaatcctccccacccttgagaatggacttggtgagatccaccccctgcctgcaaagcattgcccctaactccaccgcctgtcccaaaagctacaagaactaatgataatcccaccatactttgctgactctcttttcacactcagcccgcctgcacccaggtgaaataaacagcctcgttgctcacacaaagcctgtttagtggtctcttcacacggacgagtgtgacactgtatgtgtggttgtgttccagggagggggtgtgtggattctgagcaataaacagcatttttaacattcatgattgacttctaaagactgttggtacgtgaggaagaaacctggaagaggaagaggaaagcaaaggagtcaggaatggctcttcctcaggtgagatgatattctcggtggattgttctgtctccttcctctcagaaaccctgggccttggagttgggaatcttctctgggtctcaagtgtcctgcctgacaggtttgctcacacccatgtcttccttcagtccctctcatctcacttagattccatctcttgtaacccagtgacatgaatttgggaagaggctgcactgggcatggtcctgggaagggctcacacccagacatggatggagacagggtgagggtcctgtggtgtcagtgctgttgggcagcggggattgttcaggggccacatctggatgctctgtcagctttctgtggaccaggattagagcagctgccaatgggagtcgcgtatgaatgtgcacaaagtacgtgtaaattctagaaaacgaaaccaaaaacagaaaatcttttttccccctgattttatactacatttttaggtaatggattgagttcgtgtttctgactccaaaaatcgtactaattagaatggaaagttcatacagacatgaatgatagaaggtgttttattccatcattagtttaagaataggaaatcaacctgaataatagcaggagattcattcaaccactcttaacacattaagttcatggagactggggttactgtggagaggcttgtgaaacaggtgtttttggtaaaaatggttacaatttattttttgagatggagtcagcctctgccacccaagctggagtgcagtgacatgatctcagtttactgcaacctccgtctcctgggttcaagtgattctcctgcctcagcctcccaagtagctggggttataggcatgttccaccacggccatctaattttttgtatttttagtagagatggggtttcatcatgttggccagggtggcctcaaactcctcacctcaggttatccgcccacctcaggctcccagagtgttgggattacagacactagccactgtgctgggtccttttgagtttctgattagcgttgccaaaggaggcactcagatatgcatgtatgtcagggagcagagcggtgactttgaatagaaggtgagtctggtttcctaagcagttcctagcttgattttaccttttgcttagtgatttggggctccatattcattttcctttcacacagcccaaccctcacaccacctgtggtctatcttgcctgttctgtgtgattactgttgtgcctttgtcatccactgtctggatcctagtgagaacaaggccccaaggggagggcagagccaaaacatggggctgtgctgggctcgccccgtctgagtggagctcaaccctggcttcacattagagtgcagagcattttgcaaatagagcttttgtgctgctttagcagggattcttattctgacgggatggaacccaccctcagtaatacctgcagtggcccaggtgcttgtcatctgtgtgcagcattgagcatcgaagctctgtatcctccatttctgagtgctgagctcagcctgtgatccagagaggtgaggggttgtcctctggatgcggtttgattagggatgggtctgtgccctgaaggggagatcagtccagcccagctccccactgctgcctagtgtgtgggggcttttctaggaggggagtgagatctgaagaccagggtcagatatacacttgtaggtcttcctgtggtagtttcttatctctgcatgatctctggtgcagtgggcagcagaggaccgtctttctacagggtgaggtctcccctgtctgtttttgccccaggaagggagtgagtcatttctaacatgaaagctcgtctttttttttttttttttgtggggaaaagaaagatcagaatgttactgtgtctttgtagaaaagggagacataagaaactccattttgatctgttctaggaaaaattcttctgctttgagatgctattaatctgtaactttagccccaaccctgtgctcacagaaacatgtgctgtattgaatcaaggtttaatggatttagggctgtgcagggtgtgccttgttaacaatatgtttgcaggcagtatgcttggtaaaagtcatgccattctccattctcagttaaccagggacacaatgcactgcggaaagccgcagggacctctgccctagaaagcctgggtattgtccaagtttccccccactgagacagcctgagatatgtccttgtgggaatggaaagaccttacatccccgcgcctgacacctgtaaagggcctgtgctgaggaggagtagtgaaagagggaggcctctttgcagttgagataaaaggaaggcttctgtctcctgctcatccctgggaatggaatgcctcggtgtaaagccgaccattggttctattctgcgataggagaaacctgccctgtggctggaggtgagatattctggcagcaatactgctctgtgactctttgctacactgaaatgtttgtgtaaagtgaaacataaatctggcctacatgcacatccagtgaagggcgccagcccctccacacctgtgagtatttctcatcaggtgggatgagagactgagaaaagaaataagacacagagacaaagtatagagaaagaacagtgggcccaggggaccggcgctcagcatacggaggacccacatcggcgccagcctctgagttacctcagtatttattgatcattatttttactatcttagcgaggggagtgtagcagggcaacaggtagggagaaggtcagcagggaaacaagtgagcaaaagaatctgtatcatgaataagttcaaggaaaggtactgtgcctggatgtgcacataggctagatttacgtttctcttcacccaaacatctcaatgtagcagagtaacagagcagtattgcctccagcatatcttacctccacctaccgggtggttttctcctgtctcagaatggaaccaatgggaatggtcagctttacagggagacattccattcccagggatgagcaggagacagaagccttcctcttatctcgactgcaaagaggcctccctcttttactactcctcctcagcacagaccgtttactggtgtccgggtgggggatggtaaggtctttcctttcccatgaggccatatctcaggttgtctcagtgggtcccccttggacactgtccaaggtattgtccaccttgcacaatacccaggctttcttgagcagagctccctgctgctttctgcagtgcattgtgtccctggttaattgagattggagaatggcgatgacttttaccaagcatactgcctgcaaacatatgttaacaaggcacatcctggccgagcatggtgactcaaacctgtaatcccagctctttgggaggctgaggcaggcagatcacaatgtcaggagtttgagaccagtctgaccaacatggtgaaaccccgtttctactaaaattacaaaaattagctgggcgtggtggcgggcgcctgtaattccagcgactcgtgagtctgaggcaggagaatcgcttgaacctgggtggcagaggttgcagtgagccgagatcatgccactgcactaagcctccataacaaaatgatactccccctcggaaaaaaaacaaaacaaaaaacaaaacaaggcacatcctgcacagccctaaatccattaaatgttgattcattacagcacatgtttctgtagcacagggttggggctatagtttacaggttaacagcatctgaaagcagaaacaattttccttagtacagatcaaaatggagtttcttacgtcttccttttctacatagacacagtaacaatctgatctctctttcttttccccacaatccaggcatggtacatttccttaaatttattaatgatacagattcctttgcttatatgtttccctgctgacattctcctcaccatcaccctgttgccctgccgcactccccttgcgaaaatagtaaaaacagtgatcaataaataccgagggaactcagagatcagcgccagtgcaggtcctcgcatgctaagtgtgctggtcccctgggcccactgttttttctctatagttcgtctctctgtcttatttcttttctcagtctctcatctccacctgatgacaaatatccgcaggtgtggaggggcaggcccccttcatttttcacatacaggattgatttctaaagactcgtgttacatgaggaagcagctcagaatgttgtaagagagcgagttagagaaacaccatacttagagacgaattcaggcgtccttttttagctggtgaccaagagatggcttcacgctcaaaattctctcagccctgaagaaggggctagattttcttttataccttggtctaagaaggggaggggatagcctagccgaagcaattttacagaaacagaataggcaaaaagtaaaaaattaatggttacagagatagttacagaaaaacaaacagttccaggcacaggggcttgaactatcactaagagataaatgcagcggcttttaggtaccttccaccgagcacattcccaggggctgcttgtacagcctgcctgaatatcttatcagcaggtgcattcctggatgtgcttggagtcagcttgcactatttattcccttaaggcggataaagggcactgcaagtgaagaagctaaaatggagtctgtccggctctctctctaggagagtcacttaggttaaaacgaggtagggtagccgggcgctgtggctcatgcctataatcccagcactttgggaggccgaggcgggcggatcacgaggtcaggagatcgagtccatcctggctagcatggtgaaaccccgtctgtactaaatatatataaaaaattagctgggcgtggtggtgggcgcttgttgtcccagctactcgggaggctgaggcaggagaatggcgtgaacccaggagacggagcttgcagtgagcggagatcgggccactgcactccagcctgggcgacagagagagactccgtctcaaaaacaaacaaagaaacaaacaaacaaacaaggtagggtatcacaagaagaggaaagaaaaggagccagggctggctcttcctcaggtgaagtgatacttctcggtggattaatctgtctctttcctttttgaaatgccaggtattgtagtagccagtctttcctgagtctgaagcgtcctgcctgacaggctcactcgcactcacccatgccttttctcagttcctctcatctgctctgagattccatctcctgtgacccagtgacaagagcttcttaagaagctccactgggcatggtcctgggaggggctcacacccagacatggatggacacggggtgtgggccccttggtgtcagtgctgctggacagcctggatggttcaggggccacatctggatgtcagctctttgtggaccagatcagagaaacaacatatgaaatacatgttaatgtgcacagatatctggtaaattctgaaaaaggagaccaataaagggagatagtttgtatctgacttggtaatgcatttgaaatcactttgggggcggggcctggttagacggtgggggccgggcctggggtggggcaagagggaggaggctgcttggaggtcgctctggacagcgggacggggcggggccagaggtttatcctcgtttgggggcgggacctgagatggggtgttgttcttaagggcggggcctggctgcgatgggtcgggggctctctcctcagctgggcccatgatgtgacctgctgtcatcctcttgacctccaggactggatccccggggttctgattggtggattgtttctggtgtgccgtgatattacccctaatatcacagggatgcttcctgccctttttaagttagcatttcaaacaatcgaaggtaaaacaacatattgtagtgggccaactgtactgaacgctgaatcgttttttctctgaagttgaaaacggttttaatgtaaagcgccttttttgagcaggtagagtcgcgcatcctgcaggcggggcgagctcccctcaggctggggcaggacgggggacaggggcaggtacctcggtaaaggggtggagtggggcgctgcttacaaaggggactgacaattagaatggcttagtaaactaagcaaggtcctgggttgtttgagtggataatggaaatagaaaggtgacatggaaaactgcctattatacacctattataaaggtggaggaaattttcatatttcatggaaataaagccagaactcggagcggtggatcacatctgtcatcccagcactttcagaggccgaggtgggaggattgcttgaacccaggagtgtgtgatcagccagggcataatagtgagacctcgtctctactaaaaataaaaaaaaaatcagccagatgtggtggtgcacacctgtgttctcagctgctcggggcgctgagatgaaaacatcacttgaggccgggcgcagtggctcacgcctgtaatcccagcactttgggaggctgagacgggcagatcacctgaggtcgggagttcgagaccagccttaccaacaaggagaaactccgtctctactaaaaacacaaaaaaattagctgagcatggtggcccatgcttgcaatcccacctactcgggaggctgaggcaggagaatcgctcgaacccgggaggcggaggttttggtgagccgagatcccgccactgcactcaagcctgggcgacagagcgagactccgtctcaaaaaaaaaaaaaaaaaaaaaaaaaaaaaaaaaaaaaagaaaacatcacttgagccagggagttggacgctgcactgagccctgatcttgccagcacactccaacttggatgacagagctagaccccgtctcaaacaagcaagcaaataagtgagaggcgtaattcctccttcaaaaataaaggaagagattttctttcatgtagtctcttttcttaggatatttatttagaaaatgtgtaaatgaattttctctgtcttctgaagcggtatgttatttgagacagagtttcgcgcttgtagcccacgctggagtggaatggcgtgatctccgttcactgcagcctccatctcccgggttcaagccattctcctgcctctgcctcccgagtagctgggattgcacgcatgtgccgccacgcccggttaatttcgtatttttagtagagaagggtttttccgtgttggtcagactggtctcaaactcctgacctcaggcgatccgcccgcctctgcctcccaaagtgctgggattacaggtgtgagccgctgcactcgaccagaagtggaatttttttagaaaagaactaaactgttttttagcttaatgacccagggatgtatttccgaaggacttgggagctctctttgaaaggcaaccaacaacagagatagcacttgtgtctcagtaggaaattaaattattcaaacatcaagtgattccaatttaaagcaatggatatttaaataattctgagccttgagaggaatgtggtcatgcaaccagagtccagtggaatgcaggcgcaacttctaagagttttcctgtaaataatttggaaaactggccatgcacagtggctcacgcctgtcatctcagcactttgggagactgaggctggcagatcacgaggtcaggagacagagatcatactggccaacatggtgaaaccccgtccctaataaaaatacaaaaattagctgggcatgttggtgcatgcctctagtaccgtctattctggaggctgagccatgagcatagggagtcggaggttgcagtgagccgagattgcgccactgtactccatcctggcgacagagcgattctccatctcaaaataaatacataaatagcaataaaaataaaaaaaataattaggaagactaagcagccccagcgatatgacctcctcagagcattgtgccttcttacgcagtgataaagtaaccttccttgaagtgtatcaatccatcaccaatcaacttgctgcaacctatgcactggtcttgaatggaaaacgtggtgattctgctaaagcatctctgtctttccctgtgtgtgaaaccttaacgtctctactttggaacgctgatcccatttatttggagttgatgtttccaggtggctttcttcaagctttgtgttcacattaactctgtacttaatcatatattttaaattttattatttactgctgacatcaatttctgtcgtatggtaggcgcctgaccagagagggcacctgtcgccatgttgtaaaactcaaacttgccaaaaagacatgggttagggtttcttcccctccctcgggatgaagctagttagctgacacagatggtcacctccattaccaagtagagccaggatgaactatgtgcgaccaagggtgttgtcaagtcctcttccctgaggactgattagtgtttatcttgaaaatatgtccttaatgggttgtatagaacagtgaagtttctttctctcttttcaacctcttagctgtttgcctctatttcccatcacattctggtcaaggcttattgatttatttatttagagacggaatctcttctgtcgcccaggctagagtgcaatggtgcgatctcggctcattgcaagctccgccttctgggttcacgccattcttctgcctcagcctctccgagtagctgggactacaggcgctgggcaccacgcccggctgattttttttttttgttttttttgagaccgagtcttgctctgtcacccaggctggagtgcagtggtgctatcttggctcactgccagctccgcctcctgggttcacgccattctcctgcctcagcctccccagcagctgggacacaggtgcacgccaccacacctggctaatttttttgtatttttagtagagacggggtttcaccatgttagccaggatgacctcgatctcctgacctcgtgatccgcctgcttcagcctcccaaagtgctgggattacaagcgtgagcccccatgcccggtcctaaggtttatttattaacaaaatggtttttatttctttctctgttatcgtcgtggagatgatttctcatttgggataatattttttagttttcaattatattttgtcaacatttaaaaagcaaagtaaagaatatttcttgggccaggcatgttggctgacgcatgtaatcccagcattttgggaggctgacacaggcaaataacttaaagtgaggagttcgataccggccaggtcaccgtagtgataccccgtctctatgaaaaatacaaaaattaaccgggcatcgtggcacgcgcctgtaatgccagctgctcccgaggctgaggcaggagaatcgcttgaacccaggaggcagaggctgcattgagttgagatctcgccactgcactccagcctgggcaacagaaatactgtgtctcaataatagtaataataataataataataataaagtaatagatctcttccacaaatgtgctgggacaactaactggatatccacatggaaaagagtaatgttggatccctatgtcacaccatcaaaaattttatttaaaaaagttttttttttttttttaaaaagggaaaaggcccgggcgcggtggctcacgcctgtaatcccagcactttgggaggccgacgtgggcggatcacctgaggtcgggagttcagcctggctaacatggtgaaaccctgtctctactaaatatacaaaattaactgggcatggtggcgcatgcctgtagtcccagctactcgggaggctgaggccggagtatcgcttgaaaccaggaggcggaagttctagtgagctgggatcactccacggcactccagcctgggcgacggagtgagactctgtctccaaaaaaaaaaaaagggaaagagagagagagagactaggaagggagacctgccgcagtgggtgttactttgtcgcccaggctggcttgggaccccaggctcagcaattctctccgttgcttcctgagtagctgggacctgaggctcccgcccccgcgcctctgctgtgtttaagcagcaggtggtgacctcactccttcctggcctaagcactccgtcccgcacccctggcggtggctttaaggaagtctctgaagctgagctcagggtggactctccctccctagtgaatggagatagaaagggagaggacatctattctgttccgtgggccgtcaccatgacatcgtacatgccgcccaggcagggctttgcatttcacattctagtttgcatcccggttccagacaattccagggctttggaatcatgcctcagactttctggcgctctcgcctccacaacctaaaaacagagacgctaggagagaggctgaaagacgcgcaagtcccgccccggccccgccccggccccgccctctgccggttctaaagggcaaggtctcagcgcctcgcgccccgccgctacctcgcccaggccccgcccacctcctcccacctcccgcccaggcctggcttccgtcctgcgcgcggagattaacgcaaacccggaagcggatcgggtggagtgaaggtcacgtcgccatggtgagttttgctctgtgttgcattaagtctccgcttcccaggtccccgccgcttctgtccctgggacgtggggtccccacagacctggaaattctcgcccgtcttccttcgcccagagcaaattgagacagcccagtgagaggccgggtgtcgcttcctttcgggtttaaagtcgtctggaggctggtcccgtcccgggtctgtctgctatagggcaatgtatacactttctattgcgtagtttttctgctcaaaaccttcttctgactcttccctcctcgcgctatttaaagtcttcacccacgaggtggattcttgcccggggcgcacctcccagccacccctcgtcggcccctggagcgtcgcgccgcagccccagtcccagggaggccgcgtcctctgcctggtcctgggatcttgcagaccccatccttctcccaaggcgccgtcccccctcctcccacctccctactcgtgccagagcctgcggctccccaggtctctcctccgcagtcaccgcttccattgaacccacactgggaaggacgcagggccctgtcctgtgacatggggtcttcttgcctgccgagctccagcccttggaaaacgcgctcctccgggatgcaggcgtcttactccaaaccctcctgcgattgtgtgggccgaagggatcaggagacagacagcagtagaaaacctgagacagagaaagaataagaaaggcccataacagatggcaaaatagaggattggtgagggatatgccaagatatggtgaaagtggaaaaagaaagcaacaaaatacctagaaaagcaggtggagaaaagcaactggagaaatgtagagaaaagctagatgtacacagagatgaaggacggcaaggtagggagagtggcagcaaagagggaggctcatcagagtgagggagagagggagggatttggagccagggcagacagagcagagtggtgctggtgtcaaggagaaccgagggagaaacacagcagggaggacacctggggatctggggtgacacagagtggggacaggggagtatatcagggaagagagaatttaacagggagagcagaggaggcgcagagatgggtgaagaggcagaaatagatggagattgaggacgattgaaagattggggagaaggagcaataagaggttaaataagttgcgaggatggagcagaagagatggaagagaaggaatagagggaagaagggggataaacagcagaagagaagaggggtacaaaatgaagagcagaatcccagggagaaagaaaagaaaacaagagctagagagagaagggggagaatgagagatatgtacagaattagggagggaagcgcagtaatgaagaaaggggggctaggcacagtggctcacgcctgtagtctccacactttaggagactgaagcaagagaattgcttgagtctaggagttcgagaccagcctgggcaacatagtgagacccctatctctgccaaaaaaaaaaaaaaggaaataacggggcataatcgtgtgcacctgtactcccagctgctctggaggtggaggtaggaggatgacttgagctcaggaggtccaggctgcagtgaactgagatcatgccactacactgcagcctggtcaacagagcgagatcttgtctcaaaagaaaaaatggggcgagagactgggtttagatcagtggatgagttcattggatatgattagttgtgacatgttgacttccctgtatataatctaataactaaaaacttgtttaaattatacagattgagaattttaaaattggtgtctataaaacatgtacattctataaatcttggcatcagaggttatgttccacttggaatccctattcaaccagagggaagtgacttattcagttgtgaatcactgtcttcccttttcctaggattgggaggatgtggggtagagaagtgggaaaaaagtcgctgtctgttattacataatacttttaatttaattaattaaatgatattttgagtcagggtctggctgtatcacacaggctggagtgcagtggcgtgatcctctaactgtagcctctacctcttggactcaagtgatcctcctacctcagccttctgagtagctgggaccagaggcatgagccaccaagcccagctagtttacatatatatatatatatatattttttttttttgtagaaacgtggtttcactatgtttcccaggctgttctcaaaaccctggggtcaaagggtcctcctgccttggcctcccaaattactgggattacaggtgggattacagggatggcccaccgcgtctggcctacatagccccccccttttttttgagagggagttttgttctttttgcccaggctagcgtgcgatggcatgatctcagctcaccacaacctccgctccctggcttcaaacaattctactgcctcactctccagagtagttgggagtacaggcatgcaccaccatgcctggctaattttgtgtttttagtagagacgaggtttcttcatgttggtccaggctggtctttaactccctacctcaagtgacccgctgcctcggcctcccaaagtgctgggattcctggcgtgagccaccactctcaacccatagtagtttttaaaagggacatcaaggcatggtggctcacgcctgtaatcccagcacgttgggagacagaggtgggtggatcatgaggtcaggagttcaagaccagcctggctgacacagtgaaactcaatctctactaaaaaatacaaaaattagccaggcatggtggcagatgcctgtaatcccagctactcaggaggctgaggcaggagaattacttgaacccgggaagcagaggttgcagtgagccgagattgcatcactgcatgccaggctgggcaacggagctagactccatctgacaaaaaaaaagagagaaagaaaaagtaaggaacatcaaagttgggcctggtggctcattcctgtaatcccagcactttgggagcaaatcactgaaggccaggagctcgagaccaacctggcctacatggtgaaaccccgtctctaccaaaaatacaaaaattagctggccatgtagacatacgcctctaatttcacctactccggaggctgaggcaggagaattacttggacccggctgggaggcagaggttgcagtgagccatgatcacactactgcactccagcctgggtgacagagtgagactccgtctccccgccccccaaaaaaagaaaaattagccaagggtggtggcatgcgtctgtagtcccatctactcaggaggctgaagcaggagaatctctttaggcaggagaatcatgccactacactgcaagctgagtgacagagtgtgacttggtctcaaaaaaacaaaaaaagaaatagcaatcagctctttaatgtctccctttatataagcagtagtcctggccatgttcggtggctcacacttgtaattccagcactttggaaggctgatgtgggcgaatcacctgaggtcaggggttcgagaccagcctgaccaatatagagaaacccggtctctataaaactacaaaattagtgtgtaggtgtggtggcgcgtggctgtaatctcagctactcgggaggctgaggcaggagaattgcttgaacctgggaggcaaaggttgtggtgagccaagatcgcgccattgcactccagcctgggcagcaagagggaaactccatctcaataaataaataaattaattaattaattaataataaaaataaaagcagacgtattcacgtgtagtcaacacgcatgaccaaattctctcacaggcaccatctgcaggaacatcctattggacaataagaactctgaacatcgcttttggccaatataaacattcagaccaggaagtctgcatcatatttttgatgtttttattgtgcaatttgttttatacaatgttttctgtgatctcagtttataaattttcccagtacacattctatgttttatattttacacacagtaactagataactaagggcaatgaatatatataaaattgctgtattgcctggtgttatgtaactgtacttgtgacattgtaattgcaccctctgacactgttagtcagttcttattccttttaatgctgtgtatttacttgaactcatacatcagaaggtagtgatcttaacatgtatttcagtcttatagtgtgtgctggtggtaagtagaagttgtggcttttttcttgagagagaattgtttagaattctgcaggctgtataaatgtacttattatttgcttgctggttttatcatgggttagaatagtttactgattaatatttaagatttcacatatggcttttcagtatatgatatgtaatggaactgacacactgcacttgttaatttcaataagtgcctgttctgcgtggatttaggtaattttatgacaggtattcagaaaaaggttgtattaacatttttttttttttgagatggaatctcgctctgtcactcaggctggagtgcagtggcacaatcttggctcattgcaatctctgcctcccaggttcaagtgattcttgtgcctctgcctcctgagtagctgggactacaggtgaccgccaccacgcctggctgatttttggaatcttttcttatcttctctgtgctacgattatttgataatacagaatttcaattgattttggttacccttacataagcttctggtggattatttaccaatataatatattgtgtggtcttttaggatttatttgtgtacagtagatattgtgtaaatatgaaggatctatacttttcattgatgtgacagtgatatgttttttgcaaactgtgatacattttagggtcacagtggaaaaatactccttactttaggcttacacatgtttgtgccctgtcagcgttttgtcatattggaaataggcttccatagaaatgatttgaagtacacgtaaagtatttattaagtatttattaaagaatcttactccttttgtgttcctaaactttgaagatcatgtttgggaagttcaaaataagtattgttttttgtgtcatatttacacatttcagtatgttttaccttctggacttaattggaaacgtattggtgtttatattttgtagatatctcttccaaatgcttgatgaaaaaggtggaagggtcacttgacccagggagttgaaggctgcagtgagccctgtttttgccaccacactccagcctgggtgagtgagctacaccctatctcaaacaaacaagccaataaatgagaggtataattcctcctttgaaattaaagaaggagattttctttcctttcatctcttttcttaggacatttattagaaaatttgcaagtgcattttctgttttctgaggtagtatgttttctttcttttcttttgtttaattttcttttatttccttttctgttgttttcttttctttcctttccaacggagacacagtttcgctcttgttgcccaggctggagttaaatggtgcgatctcggctcactgcaatttccatctcccaggtacatgagattctactgcttcaacttccagagtagctgggactacaggcacccgctataatgcctggctaatttttatagttttgtagagacggggtttcaccatgttggccaggctggtcttgaacttctgatatcagatgattctccagccttggccttccaaagtactgggattacaggtgtgagccactgcgcccggcccagggatgtatttctgaagaacttgggagctccttgaaaggcaaacaacagccacgcgcagtggctcacgcctgtaatcccagcactttgggaggccaaggcgggtcaatcccgaggtcaggagttcgacaccgcctgacaaacatgttgaaaccctgtctctactaaaaatacgaagaaattagccgggcatggtggcacatgcctgtagtcccagctactcaggaaaattgtttgaacctgagaggcagaggttgcagtgagccaagattgtgccactgcactgtagcctgggtgacaaagtgagactccgtctccaaaaaaaaaaaaaaaaaaaaaaaaggcaagcaacaagatagattgtacctgtgtctcagtaggaaattaagtaattcaaacatcaaatgattccaatttaaagctatggacatttaaataattctgagccttgagaggaatgtggtcatgcaaccagagtctagtggaatgcaggtgcaacttctaggagttttcctggctgactgtcatggctcaagcctgtaatcacaacactttgggaggccgaggcttccggatcacttgaggtcaggatttcaaaaccagcttggctagcgtggtgaaaccctgtctctactaaaaatagagagaaattacaggcgcctgccaccatgcccagctaatttttgtattaggcttagtgttagggtttctccccctccctcgggatgaagcttgttagctgacagagatggtcacctccattaccaagtagagccaggatgaactatgtgtgaccaagggcttttcaagtcctcttccctgaggactgattactgtttatcttgaaaacatgtccttaatgggttgtatagaacactgaagtttctttctctcttttcaacctcttagctgtttgcctctatttcccatcacattctggtctaaagcttatttattaatgaagtagtttttctttctttctctattatcgtcgtggagatgatttctcatttgggggaagactctttgtttttcaattatattttctcacatttaaaaagtgaagtaaagaatatttcctgggccaggcatggtgactcacgagtgtaatcccagcactttgggaggccgaggctggcggatcacttgaagtcagggttctagaccagcctggccaacatggtgaaaccccgtctctaccaaaaatatgaaagttagctgggcatggtcgtgtgcgcttgtaataccagctactcgaaaggctgaggcagaagaatagcttcaacccaggaggcagaggctgcagtgagccacgatctcgcaactgcaccccagcatgggccacagagaaatactctgtctcaaaaataaaaggaaagaaaaaagtaaaaaaagagaaagtaatagatctctttcacaaatgtgctgggacaactaactggatatttacatggaaaagaataatattggatctctatgtcacaccatgaaaaattttatttaaaaacgggttaaaaaaaaaaaggctgggcggggtggatcacatctgtaatcctagcagtttgggaggctgaggtgggcggatcacaaggtcaggagatcaagaccatcctggctaacatggtgaaaccccatctctactaaaaatacaaaaaattagccgagcgtcgtggtgggcgcctgtagtcccagttactccaaaggctgaggcaggagaattgcgtgaacccgggaggcggagcttgcagtgagccaaaatcgtgccactgcactccagcctgggtgacagagcgagactccgtctcaaaaaaaaaaaaaaaaaaaaaaaaagagagaaaaggaaaagagcgagggagagacgagggagggagccctgcgggagggggtgttactttgtcacccaggctggcctggacccccaggttcagcgattctcccgccgctgcttcctgagtagctgggacctcaggcttccgccccgtgcccgcatccctgctgtgtttaggcagcaggtggtgacctcactcctccctggcctgagcactccgtcccgcatcccaggcggaggccctagggaagtctctgaagctgagcacagggtggaccctccctcctgaatgaatggagaatagaaagggggaggatttctgttatgttctgtgggccatcagcatgaaatcgtatattccgccccggcagggctttgcatttcacattttagtttgcatgcccgttccagacaattccagggcttttgaatcatgcttcagccttcctggccgctctcacctccaaacaccgaaaaaaacaggcgctgggtgcgaggcggagggatgcacaggtcccgccccggccccgccctctgtcggttctaaagggcaaggtctctctgcctcgcgccccgcctctaccccgcccaggccccgccaaactgttcgccggccccgcccaggcctggcttcagtcctgggcgcgcaaaccccgaggcggatcgcgtggagtgaaggtcgtaccgcggcgcgtgagttttgctctgccttgtattaagtttgcgcttcccaggtccctggcgcgtctgtccctggaaagtggggtccccacggacctggaaattctcgcctgtcttccttcatccagagcaaattgagatgtccccgtaagagtccggaagttgcttgcttttgggtttgaactcgtccggaggctggtcccaaccccggtctttctgctatagggcagtgtatacacttcctgtcgcttagttttcctggtcaaaaccctgtgctgactccacccaccccgttctttttaaagtccccgacccgcgaggtggattcccgccctgggcgcctcccagcctctccgtcttcggcccctggagcgaagcgctgtgtccccagtcctggggaggctgcgtcttctgcctggtcctggaattctgcaggtgccacccttgtcttaaggcgccgtcgccccctacatcccccctcgtggtgggccctgctgctccccaattcttcccttcgcagtcaccgcttcccctgaaccagcgtagggcaggtcccagcggcttgtcctatgacaccgggtattcttgcctgcccagctccaccctccggaaaatgcgcttctccgcgatgcgggtgtcttaccccaaacccgcagagtggtgctggtggcaatgagaacagagggagaaacacagcagggaggacaccgggggatctggggtgctagagagtggggacaggggggcgtaacagggaagagagaatttaacagggagagcagaggagacgcagagataagaggcggtaatatgtagagattgaggacgatcaaaagattggggagaaggagcaacaagaggttaaataaggaccgggcgctttggctcatgcctgtaatcccagcagtttgggaagcttaggcgggcggatcacctgagatccggagttcgagaccagcctgaccaacatggagaaaccccatccctgctaaaaatacaaaactagctgggcgcggttgcatatgcctgtaatgtcagctattagggaggctgaggccagagaatcgcttgaacttgggaggcggaggttgcggtgagccgagatcgcaccattgcactccagcctgggcaacaagagtgaaactctttctcaaaaaaaaagcggttaaataagttgtgaggatggagcagaagaggtggaagaggagtaatagagggaagaaggggataaatagcaggagagtagaggggtacaaaatgaggagcacaatcccagggaaaaagaaaagaaaacaagagctagagagagaaggggagaatgagagatatgtacagaattagagagggaagcacagtaatgaagaaagaggggccaggtgcagtggctcatgcctgtaatcccagcactttaggagactgaggcagagggattgcttgagtccaggagttcaagaccagcctaggcaaaatagacaccccatctctttcaaaaagaaagaaaaaattaacggggcatgatagtgtgcagctgtaatttcagctactctgtaggcggaggctggaggatcacttgagcccaggagctccaggctgctgtgagcagagatcatgccactgtactccagcctggtcaaaagagcaagaccctgtctcaaaaaaaaaaaaaaaagggtgggggactttgggtacagatgagtgtgtgagttcattggatatgattagttgtgacatgttgacttctgtctataaaatctaataacttgtttaaattatacagatgagtttgagaattttaaatgtcctatctgtgagccatgtatgttctataaatattggtatcagaggttagcttccacttggaatccctattcagaccgagggcagtgacattcaattgtgggtcactcttcccttttcccatggtggggtaggaagtggtgggaaaaaaaaatcgctgttattacataatacttttaattaattaattaatattttgagatagggtctggctctgtcgctcagctggagtacaatggcgttatctactctaactgcagcctcgacctcttaggctcaagcgatcctccctcagtctcctgagtagctgagaccactggtgtgagacaccaagcccagctagtagttttttttttctttgtttgtttttttgtagaaacagggtttcagtatgtttcccggggtggtctcaaaatcctgggctcaaaggttcccccgtcttggccttgcaaagtactgggattacagggatgagccaccgcgcccggcctacatactaattattattattattattattagttttttgaggtggagtttcactcctgttgcccaggctggagtgcaatggcacaatcttggctaatgactctctgtgcctttagagttgaagcgattctcctgcgatactaccccctgagtatctgggattacaggcatgcgccaccatgccctgctaattttggattaggaggccgaggcaggagaatcacttgaacccaggaggcagaggttgtggtgagctgagatcgcaccattgtacttcagcgtgggcaataagagcgaaactctgtctcaaaaaaaccaaaaaagaatggagcaaaacaggagaggggcataaaatgagcagaagcccagggggaaatgcagaaaagaaacagatggagagagaaagtgagaaagggctatgcatagaatgatggagggaagcagtaatgaagacgaagagggaccctgggtgcagatgagtggtgagttgattggatgtgatgatgaagtgatgacatgttgttttctctgtttataaggtaacaaatttaaaattagtttaaattatacagatgagaatgagagttgccaaactcctgtgtctaagtgtggttcattttataatgatggcgtcagaggcagcttccctctgcaacccctcttcagccagaggacagtgacttgactcattcgttgtggatcaccctcttcccttttcatggctggggtcgggagtgggggagagaagtagggtaagaagtgactgactctgttactatatggaacgtgatgaaaggagtattaaaagtgcttttgttctctttttgtaattggtttccttttttctagttcctcttcatttcattttttttttttttttttttaatttttgagatggagtctctctgtgtcacgcaggctggagtggagtggagcagtcttgactcactgcaacctctgcctcctgggttcaaggaattctctgcctcagcctcccaagcagctgggattataggcacctgcagccacacctgtctgatttttgtatttttagtagagacagttttcaccatctaggcgggacttgtcttgcactcatgaccttgtgatccaccgccttggcctcccaaagtgctatgattacaggcgtgagccaccacacttggcctcagtaattgttttttattttttaattttagttttaatttacttatttttgttgtggtggtttttttttttttttttttttttttgacggagttttggtcttgttgcccagggtgaagtgcaatggtgcgatcttgctcactgcaacctttgcctctggggttcaagtgattctcctgcctcagcctcctgagtagttatgattacaggcacacaccaccatggccggctaattttgtattttcagtggagatggggtttctccatcttggtcaggctggtcttgaactcctgacctcaggtgatcctcccacctcagcctcccaaggtgctgggattacaggtatgagccgctgcgcccggcctttgttattgttttgagacacttttactgtttcccaggctggagtgcagtggcaggatcacagcactgtgcagcggcaacctcctgggctcaagtgattttcccacctcagcctccggagtagctggggccacagacacaccccaccaggtccggctaatgtttagatatatgtatttatttattgagactctctgtcacccactctggagtctagtggcacgacctcgtctcactgcaaactccgcctcctggggtcaagcgattttcctgcctcagcctcctgagtagctggagttacaggtgtgcaccactatgccctgctaatgtttgtatttttagtagagacatagtttctccatattggccaggctggtctcgaacccctaacattgtggtcttcctgccccggcctcccaaagtgctgggattataggcgtgagtcactatgcctgtcctcattgttttcaaagtatgatatattttcaaatatttctcctttggcccaagatttcattagatctgtattttttaaccattttaaaattgtttctctatgaaatttttttgagtttacattgaggtctgtgtgctttctagtctttatcatatatcgaaaacattttctactatgtgatatatgttgttaggttgtttcagtgtgtacttgataatgatatcaaggaccttttttctttaccctaacatgaaaattcagttgaagtagcctattccatttttttttcttatgtcatctgaaaaaatggtaatctgtgagcttctaagtaagtgtcccctcaattccctctggtccataatattctctacagatgttgaaggatgggctggattgacttggaaccttggtttagcagagcccatgtgttcttgagaaaagcatttgctcagatctcatttctacagctgcctctttttcagtgttttaaacatctattgctatgtgtgcacagttgtgtgtattttgaacatttttctgggagtgagtaatgatatgtttgggattgatgccatcagaaccttacaacttgaaagaagtttcgtttgctcaggtatataagatggtcctggaatttttgtttgtttgtttgtttttctttgagatggagtctcgctctgtcacccaggctggagtgcagtggcatgatctcagctcactgcaacctctacctcctgggttcaagcaattcttttgcctcagcctcctgagtagcagggactacaggcccccgccaccacgcctggctaatttgtgtatttttagtagagacgggatgtcaccatattggccaggatgatcttgaactcctgactttgtgatctgcccgcctcagcctcccaaactgctaggattacagatgtgatccaccccgcctggccttttttttttttttaaaccgtttttaaataaaatttttcatggtgtgacatagagatccaatattattcttttccatgtagatatctagttaggtattacaagggtgagtcaccgctcctgactggtctggaaattttctagaggaggaagaccaaggcagcctattggccctttcaggcaatcacatgggaatcagccacatgtccttcctcctcacctcagagcatctcagaataacttggtgaaatgtctcccactgtgagcctcagtgagcccacctgtaacatagaggtgaggaataagaccggaaaagctcagtcagagtgacactgacccctgaaatgactgacaaaatacagtgtgtgacttttcttctgggagaggtagtgctcagttttaactcgaattttaaagggattccagttctccaaatattaaaaaaaaaaaagcacaagatgattaaaatcaggggattagactcaaatcaccttgaaccttatcatctcacagctttaacccacttacacgactccatgtcccctgcaggcgtcgcccctgagctctacaatcctgtgtccagttgtctcagctgtctcctgggtcatcaaacaggcatccccaccttcaggtgtccacgagtggctttctaaacccccaaacacatttccttgcagtctgcacatctcagatgagagtgactgtgtacttctggaaacttagccaaacttgacagcatgtattttatatttgtgaaataaatcactttatttgtaagtgttgtaatttataatataaagagaaacttagatgtatacgtgaaaagagtgagaagatacatcacttccaatttttttttttttgagacgaattttcactcttgtggcccaggctggagtgcaatgccacgatctcagttcactgcaacttctgactcctgggatcaagggattctcctgcgtcagacacccgagtagctgggatcacagtcgactttcaaaatgcttttgggttgtgggagaaaaatgtttgaaaaccatgtccctatgggtctgtgcccccaggacctctctgacctcatctcctacctgtgccctcctctcttccactgctccagccccacgggtcgctttccttttcctggggctgaggttgctcctgtctcagggccctcacttgagctgtccctctctctaggatgctcttcccctcagctgcaagtgacaagcagcctttctttcctaggtccttgttctgatatcatcttctccgggtttcctttgtgatctcccacagcccccatttgacactgcagctgtgaaaccagaaaatcttacagagatctcagttatttagagagtttagtttgcccaaggtggtcggggcagagcttaattttatacattttatggagacatgagacatcaatcaatatatgtaagaagtacattggtttggtctgggaaggcgggacaactttaaacaaaggcaggaagacttgaagcagggaggcggcttttaggtcacagagaaatgaggcacaagtagttacaatcttttgagtttcctttttttttttgagatgaagtctcattttgtcgcccaggctggagtgcagtggcacgatctcgactcactgcaacctctgcctcctgggttcaagtgattctcctgcctcagcttcccaagtaggtgcccagatcttttttttggggggggggtggaggctttgatcagggatgagtctgtgccataaagggggcatcagtgcagcccaggtcccccctgctgcctcgtgtgtggcggcttctccatgaagggagtgagatctgaagaccggggtcaaacatacacttgtaggtcttcctgtgggactttcttacctctgcatgatctctggtgcagtgggcagtgggggacttctttctacagggtgacatctcccggttcatgtggttttgtcacaggaagggagtgagtcatttctaacatgaagtcttattttttttcacatacaggattgatttctaaagactcatgttacgtgaggaagcagctcagaagaggaaaggaaaggagtcaggcatggctcttcctcaggtgaagtgatattcctctgtggattaatctgtctctttcctttctgaaatgtagtagtattatattgtattgtagtaatgtattgtagcagccagtcttttctgagtctgaagcattttgcctgacacgttcacttgcactcacccatgcctgccctcagttcctctcaggtgctctgagattccatctcctgtgacccagtgacatgaacttgggaagaggctccactgggcatggtcttgggaagggctcacacccagacgtggataaacatggggtgtgggcccgttgatgtcagagctgctgggcagcctggattgttcaggggccacatctggatgtcagctcagagaaactacatatgaaatacgtatgttaatgtgcgcagatgtgtggtaaattctgggaaaggagacgaataagaggagatattttgtatctgatttggtaatgcatttgaagccacactagtagatcaagatgtctctgtgtccaaattttttttttttttttaagagacaagatgttggtcccagtgcagtggcttacacctgtaatcccagcattttgggaggccaaggcaggaagatcacttgaggtcaggacttagagaccagcctggctaacatggtgaaaccccatctctactaaaaatacaaaaattagctgcatgtggtggtgcatgcctgtaatctcagctactcaggaggctgaggtaggagaatcacttgagtccaggaggtggaggttactgtatgccgaaattgtgccactgcactccagcctgggagatggagcgagactctgtctcaaaagaaaaaagagagagagagaaggtgtcgctctgtggcttagttctggagtacaatggcacaattcagagtttacagcagcctcaaactcctgagctcaactaatcgctactgtagcctcccaaagagcctgaatgataggcatgggtcaccatatgtatgtgtgtatattatgtatgtatttatttattttaagatggagtctcagtcagcaaagctggagcgcagtggtacgatctcggctctctgcaacctccccctcccagtttcaagcaattcttctgcctcagcctaccaagttgctgggactacaggcatgcaccaccacacccagctaatttttgtatttttagttgagacggggtttcatcatgttcgttatgctgatctggaactcctgacctcatgatctgcctatctcggactccctaagtgctgaggttaaaggtgcacaccaccatgtcaggccttattttttatattgtatttttattttgttgtctaggctggagtgcagtggtgcaatcaaagcttgctttagccttgatatcctggcctcaagtgatcctcccctcttggtctcccaaattgctggcattccaaatgggagacagccagcttggctggactctgcacatttttgagatggagtgtcgctctgttgcccatgttggattgtagtggcggcatctcagctcactacaacctctgccttctggcttcaagcaattcttttgcctcagcctcctgagtatctgggattacaggcattcgctgtcacgcctggctaattattttgtatttttagtagagatggggtttcaccgtattggtcaggctggtcgaactactgaccttgtgatttgttcacctcggcctcccaaagttctgggatttacaggcctgagccactgcacttggctaaagtctgcacttttaatgactgtcaatgcaatggaaagtggagataggcatcagtggtacaggatgctttattacatcattgattttattttatttttaaatttgttttgagttgagtctctgttgtccaggcaggagtgcagtggggtgattttgtttcactgtagcctctgactcccagattacagtgattctgttgcctcagcctctccagtagcttggattagaggtgggccaccacgtgggtaacgccatgatgtgatgtgtgtgcatgaatacatgggtggataagcccatggtttatgtagaaaacacaacatttgcaataagttttattttttataataattgtaatgattttaagtatttttcattgttgtcaactatcacaataatgagttaatggtaagatggggccgggcccggttgctcacacctgtaatcccaccactatggaaggctgaggtgggtagctcatgacatcaggagttcaagaccatcctggctaagatggtgaaaccctgtcgctgctaaatatacaaaaattagatggatgtggtggcaggtgcctcaaatcctagctactggggaggctgaagcaagagaattgcttgaacctgggtggcacaggttgcagtgagctgagagattgtgccactgtattccagcctgtgcaatagagtgagactccatctggaaaaaaaaaaaaataagaagtattgggaaggattatatgtatgcctgtgtgtgtccattcagcgaccttgtaggatgctccgtgttcttaccctgggacctttgtcacattctctgcactagataaacccgtgtcagtttagtttaaagctgtatctgttacttcagcgtttatattcaaatgtgaatcccagacatctggattcagtgcttgtgttgacatttttagctatttgatttgtggtaattttcctagtatgtgtgatgcacttgtgtccaagtacagatctttcttcatgggacagtatgttattttatggcttaagacatgggaagcacttagaacagtgtatagcacatgggaagcattcaaaaatgttagtcatggctattgctgtcatcataacagttttttttttttttttggagacagagtattgctttgtcacccaggctgaagtgcagtggcatgatattgggtcattgcaacctctgcctcctgatttcaagcaattctccagcctcagcctcccaagtatcagggattacaggcacccaccaccacacccagctaatttttgtgtttttactagagaaggggtttcagcgtgttcccaggcgggtctcaaactcctgacctcatgatccacctgccttggcctcccaaagtgctgggattacaggcatgagccactgtgcctgaccgatcatgatagtttttagatttggacttttctttcaaagccaatggactctgtcctctctgaaacaccgcttgtatcttagttcatctagagactaaatatcgccttgtatgttgaacataatagctgacatgtctgtagagaaaaccctgtgtttgcttttttttttttttttttttgagatggaatcttgctctgttgccaagctaaagtgaagtggtgcgatctcggctcactgcaacctccgcctcctggattcaagcaattctcctgcctcagcctcttgagtagctgggagtacaggcctgcgccacaacacctagctaatttttgtattttcagtagagatgtggtttcgccatgttggccaggaaggtcttgatatcttgaccacattgtctacctgccttggtctcccaaaatgctaggattacaggcgagagccattgcctggaattgctttttttttttttttttttttttagatggagtgtcagtctgttgcccaggatggagggcagtggtgcgatcttggctcactgcagcctccatctcctgggttcaagtgattctcctgcctcagcctcctgtgtagctgggattacaggtgcctgccaccatgtccgtctaatttttatatttttagtagagacaggttttcaccacgttgaccaggctggtctcaaactcttgacctcaaataatctgcccaacttggcctcctgaagtgttgggattacaggcatgaaccacctcacccggccctgtgtttcctttttatttatatagtttttatattgtccataaaatcgagacttccatagtgacttatgggatcttaaaatctttcaaggaaaagtacaataaaatgcaactatacggaaaaaatagtcaaaaataccttaacatccttttgtcagaacacagtctttgatcaaataaatacttattttcccttttctcatttcctgtgaaggtgataactcaatcctccataatgttttgttgaaatgtatgtttcattttagggacgcttgactttcagggatgtggctatagaattctcattggcagagtggaaattcctgaaccctgcacagagggctttgtacagggaagtgatgttggagaactacaggaacctggaggctgtgggtgaggaaaatgtccctgcagacatgaggagtctgctcctgtctatcttggctcttcctggttttgtattctcttttgtgattttgccccatccatgctggttttttttttttttttttttgacatggagttttgctcttgtttcccaggctggagagcaatggtatatcggttcaccataacctccgccttccaggttcaagtgattctcctgcctgagcctcctgagtagctgggattacaggcatgcgccaccatgcccagctaattttgtatttttagtggacacagggtttctccatgttggtcaggctcgtctctaactccagacctcaggttatccgcccacctcaccctcccaaaatgctgggattacaggcgtgagccaccatgcccagctcattctggtttttgaggagcatcacagaagcgtctctcactggcactgtgacaacgttcatcccataaactaatgatcatcttctctaagcagcagtcagtggtgttgcaattcctcccagcgaggacatcattcgggctcacagcctcatatgtatgaggctcttgactgaactcttgttcatgtcacatttttcacaccaatatgtgtcactgttcatttttaacaagaaaacctatgttcagtttgttgtaggatcaaccctgtaagagatatggttttcatcaatcttattgagggagcttgtgaggttgaatgaggtttccatagtttagttctactgtcatttccttaagacacagtgcctttcaacttgttcatttctatgttgttgttgtttttttctcatagtcttgctctgttgcccaggcttgagtgcagtggcatgatcttggctcaccacaacctccaccttttgggttcaagtgattctcctgcctcagcctcttgagtggctgggattacaggcatgtgtcaccacacccgggtaatttttggtggttctattacagatggcagtttcaccatgttggccaggctggttttgatagcctggcctgatgtgattcagctgccttggattcccaaagtgctgggattacaggcatgagccacagcccctggcccatccgagttgtttttaaggctgaataatattccattgtatgtgtataccacattttcctcacatatttatctgtcgatgcacatctttactattataaataatactaccaggctgggtgcggtggctcacgcctgtaatcccagcaatttggaaggctgaggtgggtgaatcacctgaggtcaggagttcgagtccagcttggccaacttggtgaaaccacatttctattagaggtacagttttttttttgtttctgttttttttaagatggaatattgctctgtcacccaggctcaagtgcagtgcagtggtgtaatctcagctcactgtaacctccacatcccaggtcaagcaatctcatacctcacgcttctgagctgttgggattacacacatgcaccaccatgcccggctaatgttttgtattttttttagtagagacagtgtttcaccatgctggcctggccggtcttgaactcctgacctcctgatgcacccgctcatcctcccaatgtgctggtattacagacatgagccactgcactcagcctagctctgttttcacaaacacatctctacctactgtgccaggggatccttgttcacccccatggtctactgtactcttcatagagtttacttgtttgtttgtgtgtatgcctttctggtatctacacaggggatattgttgagtatattcttgaaactggaaatcagagtcacttaatttaaggatgtaaaactgctttcacctcaggccaccatactgctgcttttttggatctctttcattcttgtcccttgcccatattgtaatttgaatatttaaccttgggtcaatattttaacatttgctcaattagttccactttcgtccaagctcaagatttggtctatcctagtggaattatattcccacagaggtgcatgcacaaagtttactcctacatgcccattacttcctgctctccacccttgcccttcctttcctggccttgactcacatgatacattgatctggatgcaaatactgtttctttccagcctattgattttgtaatgctgaacaccccaatttccccgtgagcccctcccctccaacaccactctcactgagtaagtcaagaccttgttcatccactggacaaaattataggaggccgcttaaatcagtgtgtgcagggcatcatgactcagcacatgatccatgagggatggcttcagaaccactgtcagcagcgcagctcagcgcttgtgtcccagctcagcctttgtatcccccttgatgtacttctatctgttctccttgtattttctggtctggtcattttctgtactgcctgtgctgactattgtgcctaagaacatgtcgtgggatccttcatgcccaggattaagtcttgtccctcacttaccttatgtgcaaactggggtcatgtccatgaacactgtgggcctcctgtcattatttgagaaataatgataatttgcctccagggttggttttttttttttgtttttgagatggagttttgctcccgttgcccaggctgaagttcaattgcacaatctcagttcaccacaacctccacctcctggatttaagcgattctccttcctcagccttctgagtagctgggattagaggcatgcaccaccacacctgcctaattttgtatttttagtacagatggggtttccccatgttggctaggctggtctcaaactcctgacctcaagtgatctacctacctcagcctcccaaagtgctgggattacaggcatgaaccactgtgtccgggctatttttttttttttaatggagtttccctcttgttgcccaggctggagtgcaatggtgcaatcttggctcactgcaacctcgacttcctgggttcaagtgattgtcctgcctcaggctcccaagtagctgggattatgcctggcacaagcctggctaatttttgtatttttaggagagatggggtttctccatattggtcaggctggtcttgaactcccaacctcaggtgattcatccacctgctttttaaaacaagtgaatactattagatggcttcatataagttttatagtacattctcaacttcctttgtttaataagatttttcagccttcagtgatgttgatgatgagatgccccttttcctgcctcactcatctcactgttctgtcagaaatagcttagactggccagcttcagtggctttcacctctaattctagcactttgaaaggctgaggtgggtagatggcttgaggtcaggagtttgagaccagtcaggcaaacataatgaaaccttgaatctactaaattaaaaaaaattgggcatgatgactcatgcctataatcccaaacttttgggagggcgagacgggtggatcacctgaggtcagaagttcaagaccagcctggccaacgtggtgaaaccccgtctctagtaaaaatacaaaaattagctgggcgttttggtatgcacctgttatcccagcttcttgtgaggctgagacaggagagtcacttgaacctgggaggtggatggtgcagtgaaccatgatcatgccactgcacttcagccaaggtgacagagttagattccatttgccaccaaaaaaaaaaaaaaaagttagccaggcatggtggcatgtgtctgtactccctgcctagctgttagtccattcttagttcttaaaatgttgtatattttcttgacctcatacatcagaaggtagtgatcttaacatgtatttcagttcttatattgtgtgctggtggttaagtagaagttgtggcttttttcttcagaggaagttgtttagaattctgcgggctgtataaatgtacttatttgcttgctggttttatcatgggttacaatattttattaattaattttataattttacatatggcttttcggtatgtggtatgcaatataactgacacactgcactcgttaatgtcacaaagtgccaccaggtgcagtggctcacacctgtgatcccagaaatttgggaggtcaaggggggtggattacttaaggtcaggagtttgagaccagcctggccaacatggtgaaaccacatctctactaaaaacacaaaaattagccaggtgtagtggtgtgtgcctgtaatcccaggtactcaggaggttgaggaaggagaatcacttcaacccagcaggcagaggttgcagtgagctgagattacaccatgacgctccaagttggagtgcaagactccttctcaaaacaataaaaatggaaacaaatttttttttttttttgagatggagtctcactctgtcgcccaggctggagtgcagtggcatgatctcagatcactgcaaagtccacctcctgggttcataccattctcctgccacagcctcccgagtagctgggactgcaggcgcctgtcaccacgcctggctatttttttgtgtttttagtagaaacagagtttcaccgtgttatccaggatggtctcgatctcctgaccttgtgatccacccttctcggcctcccaaagtgctgggattacaggcatgagccaccgcacccggcccaaaaattttttcaaaagtcactaagtgcctgttctgtgtagatatatataattttatgacatttatttagaaaaatattgtactaacttttttcttttttttttttttctgtttgaggcagagtctactttgccaccctggcaggagtgcagtggtgtgatcttggctcactgcaacctctgcctcccgtgttgaagtgattcttgtgcctcagcctcctaagtagctgtgactacaggcacggaccatcacacctggctaatttttgtaatcttttcttatcttctcagtgctataattgtttgataatacagaatttccagtgcttttggttatccttacatgagcttgttgtggattatttaccaatatagtatgttgtgtggtttttttttttttttagcatttatttgtacacagtaaatatggtttaaatatgaagaatatatatttttctcttccttgatgtgacagtgatatgttttttgcaaattgtgatgcacttcaaggtcacagtggaaaaatactccttactttaggcttatacatatttgtgccctgtcagtgttttgtcatgatataggaaatagactttcatagaattgatttgaaggacatgtaattgccctttatttactaaagaatctcactctttttgtgttcctaaactttgaatatcatgtttgggaatttcaaaataagtattgttttttgtgtcatatttacacacttcagtatgatttaccatctgtacttaattggaaatgtattggtgtttatattttgtagatatctcttccaaacacatgatgaaggaggtcttgtcaacagggcaaggcaatagagaagtgatccacacagggacattgcaaagacatcaaagttatcacattggagacttttgcttccaggaaattgagaaagaaattcataacattgagtttcagtgtcaagaagatgaaagaaatggccatgaagcacccacgacaaaaataaaaaagttgactggtagcacagaccaacatgatcacaggcatgctggaaacaagcctattaaagatcagcttggatcaagcttttattcacatctgcctgaactccacatatttcagatcaaaggtgaaattgctaatcaacttgagaagtctaccagtgatgcttcctcagtttcaacatcccaaagaatttcctgtaggccccaaatccatatttctaataactatgggaataatcccctgaattcttcattactcccacaaaaacaggaagtacacatgagagaaaaatctttcccatgtaatgagagtggcaaagcctttaattgtagctcactcttaaggaaacaccagataccccatttaggagacaaacaatataaatgtgatgtatgtggcaagctctttaatcacaagcaataccttgcatgccatcgtagatgtcacactggagagaaaccttacaagtgtaaagagtgtggaaagtccttcagttacaagtcatcccttacatgccatcatagacttcatactggagtaaaaccttacaagtgtaatgagtgtggcaaggtctttcgtcaaaattcagcccttgtaattcataaggcaattcatactggagagaaaccttacaagtgtaatgaatgtggcaaggcttttaatcaacaatcacacctttcacgccatcaaagacttcatactggagtgaaaccttacaaatgtaagatttgtgagaaggcttttgcgtgtcattcctatctggcaaaccatactagaattcatagtggagagaaaacatacaagtgtaatgagtgtggtaaggcttttaatcatcaatcaagccttgcacgtcatcatatacttcatactggagagaaaccttacaaatgtgaagaatgtgacaaagttttcagtcagaaatcaacccttgagagacataagagaattcatactggagagaaaccatacaaatgtaaggtttgtgatacagctttcacgtgtaattcacagctggcacgacatagaagaattcacactggagagaaaacttacaagtgtaatgagtgtcgcaagaccttcagccgcaggtcatcccttctatgccatcgtagacttcatagtggtgaaaaaccttacaagtgtaatcagtgtggcaataccttccgtcaccgggcatcccttgtataccatcgtagacttcacactctagagaaatcttacaaatgtacggtttgtaacaaggttttcatgcgtaattcagtcctggctgtacatactagaattcacactgcaaagaaaccttacaagtgtaatgaatgtgggaaagcttttaatcaacaatcacatctttcacgtcatcgtagacttcatactggagagaaaccttacaaatgtgaagcatgtgacaaagtttttggtcagaaatcagctcttgagtcacataagagaattcatactggagagaaaccatacagatgtcaggtttgtgacacagctttcacgtggaattcacagctggcacgacatacaagaattcacactggagaaaaaacttacaagtgtaatgagtgtgggaagaccttcagttacaagtcatcacttgtatggcatcgtagacttcatggtggagagaaatcttacaaatgtaaggtttgtgacaaggctttcgtgtgtcgttcctatgtggcaaaacatactagaattcacagtggaatgaaaccttacaagtgtaatgagtgcagcaagaccttcagtaacaggtcatcccttgtatgccatcgtagaattcatagtggtgagaaaccttacaagtgtagtgagtgcagcaagacgttcagtcagaaggcaacccttctatgccatcgtagacttcatagtggtgagaaaccttacaagtgtaacgactgtggcaataccttccgtcactggtcatcccttgtataccatcgtagacttcatactggagagaaatcttacaaatgtacggtttgtgacaaggctttcgtgcgtaattcatacctggcaagacatattagaattcacactgcagagaaaccttacaagtgtaatgaatgtggaaaggcttttaatgaacaatcacacctttcacgtcatcatagaattcatactggagagaaaccttacaaatgtgaagcatgtgacaaagttttcagtcgcaaatcacaccttaaaagacataggataattcatactggagagaaaccttacaagtgtaatgagtgtggcaaagcctttagtgaccggtcaacacttattcaccatcaggcaattcatggtatagggaaatttgattaatataatgattgtcacaaagtcttcagtaacactacaacaattgcaaatcattggagaatccatgatgaagagaaatcttctgagtgtaataaatgtggcatgtttttcagacattgttcatacattgcagttcattggcaacctcatactggagagaaaccttacaaatgtcatgattgaggcaaggtcttcagtcaagcttcatcctatgcaaaacaggagaattcatacaggagagaaacctcacaagtgtgatgattgtggcaaagcctttacttcacattcacacctcgttggacatcagagaatccatactggacagaaatcttgcaaatgtcatcagtgtggcaaggtcttcagtccgaggtcactccttgcagaacatgagaaaattcatttttgagataactgttcccaatgcagtgagtatagcaaaccatcaagcattaattgacattggagtcaattcagcattgacttgagtttgtgttgacttaacattgagttcaagccttaattgacattcaagtgtttatgttaagaggatggggccaggtgtggtggctcaggcctgtaatcccagcacgttggaagaccaaggcacataggtcacttgaggtcagaagtttgaaaccaccatggccaacagatgtcggccactttcgccatcctgttttttgtttcttattttcttatttatttatttatttattttgagatggagtgtcactcttgttgcccagcctagagtgcaatgatgtgatctcagctcaccacaacctccgcctcccgggttcaagcgattcctctgcctcagcctccctagttgctgggattacaggcatgtgccaccacacccggctaattttttgtatttgtagtagagacggggtttctccatattaggctggtcttgaactcccaacctcaggtgatctgcccaccttggcatcccaaagtcctgggattacaggcatgagccaccgtacccggtcttgtttcttattttctattttttatttttttgagaggcaggagaatggcgggtgaacccaggaggtggagcttgcagtaagcccagatagcaccattgcaactccagcctgggagacagagtgagactccgtctattaaaaaaaaaaattataaataaaaaaatgtattttaaccagttagtctggttttcagtttcctttccttatgtcatttgttaaaatcttcagctgggagctatttattgcgtgtttctctcaaggccctctggaccattctggaaaaatgttgaaacatgggctggagtggcatagaatgctcctccaaaagcacccatgtattcttttgctttgtttgtttgtttttttttaaatggagtctcgctctgtcgccttggatggagtgcagtggtgcgatctcagctctgcaacctctgcctcccggcatcaagtgattctcctgcctcagtctcctgagtagctgaaattacaggcacctaccagcacacctggctaatttttatatttttagtagagacagggtttcaccatgtttgtcaggctggtctcaaactcctgacctcgtgatccgccagacctggcctcccaaggtgctgggattacaggcatgagccaccgtgccccgcctctttttttttttttgagatggagttttgctcttgttgttcaggctggagtgcaatggtgcgatctggtgtcactgcaacgtctgcctcccgggttcaaggcattctcctgcctcagcataccgagtagttgggattacaggtgccctccaccactcccggctaattttttgcattgttagtagagacagggttttaccatgtgggccaagctggtctcgaactcctgacttcaggcgatctgccgaccttgccctcccaaagtgctaggattacaggcgtgagccatcgtgcctgaagactcatgtattcttgattgaaataatttgcttatgtctcagttctacagttgaccttctttcactgttttcaaggtcaatagctgtgtgttcacacttctgcattttataaatgttactgtgattttcttgtaaggaagaattaactgtcgggaatcaatgtcatcagaatcttgcaaaagaagtttctttagcataggtatgcgtaagatgcttctctgattttcaaggatgtgggtgataagaccaacccctcccattagcccttccaggcccccatgtaagacttcacacacaccttctcactcatctcagaccttgtcagtgtaacttggtgaaaatgtgagcctccctgcaacttggcgatgaggggcttcaccagaaaagctcagcccgagtgactctgacccctgaaatgactggcaaaatggagtgcgcgtctaggtgtggctttttttttttttttttttttttttttgagggtaggagtgcccagttgtaattagaattttctttctttcttttttttttttttttgagacagagtctcgctctgttgcccaggctggagtgcagtggcgcaatctcggctcactgcaagctccgcctcctgggttcacgccattctcctgcctcagcctccggagtagctgggactacaggcgcccgccaccgcgccttgtatttttagtagaggcggggtttcaccctggtctcgatctcctgacctcgtgatccgcctgcctcggcctcccaaagtgctgggattacaggcgtgagccaccgcgcccggcatctgaactttgttttatttattttttttgagacagaatctcactctgtcacccaggctggagtgcagtggtgtgatctcggctcactgcaacttccacctcccaggttcaagcgattcttgtgcctcagcctcccgagtagctgggactataggcgtgtgccaccacgcccagctaatttttatatttttagtagagacagagtttcaccatattggccaggctggtcttgaactcctgacctcgtgatccgcccgcctcggcctcccaaagtgctgggattacaggcatgagccaccatgcctggcagcatctgaacttttaatgacttggaattgtggggaaaagagagagatcagactgttactgtgtctatgtagaaagaagtagacataagagactacattttgttctgtactaagaaaaattcttctgccttgagatgctgtgaatctgtaaccctagccccaaccctgtgctggcagaaacatgtgctgtgtcaactcaaggttaaatggattaagggctgttcaggatgtgctttgttaaacaaatgctagaagacagcgtgcttgttaaaagtcatcaccactccttactctcaagtacccagggacacagaacactgcgaaaggccgcaggaacctctgcctaggaaagccaggtattgtccaaagtttctcccatgtgatagcctgagatatggcctcatgggaagggaaagacctgaccatcccccagcccaacacccgtaaagggtctgtgctgaggaggattagtaaaagaggaaggcctctttgcagttgaggtaagaggaaggcatctgtctcctgctggtccctggacaatggaatgtctcggtgtaaagcccaattgtatattccatctactgagataggagaaaactgccttagagctggaggtgagacatgctggaggcagtactgctctttaaggcattgagatgtttatgtatatgcacatcaaaagcacagcactttttcctttaccttgtttatgacagagacatttgttcaggttttcctgctgaccctctctccactattaccttattgtcctgccacatccccctctccgagatggtagagataatgatcaataaatactgagggaactcagaggccggtgcaggcgcgggtcctctgtatgctgagtgctggtcctgtaggcctacttttctttctctgtactttgtctctatgtctctttcttttctcaaatctctccgttccacctgacgagaaatgcccacaggtgtggaggggcaggccaccccttcaggaatggaatggaaagtgaagatacacgtcagtggtacagggtgctttatcacatcattgattttattatttttttctttttttgagttgagtctccctctatcacccaggatggagtgcagtggtgagattttggctcactgtagcttccaccttccagattacagtgattctgttgcctgagcctctcgagtagctgggattagagatgcacgccaccacgcttgtaacggcatgatgtgatgtgtgtgcatgaatacatggatggataagcccatggtttatgtagaaaacacttgatttgcaataaggtatattttttatagttgttatgattgtaagtatttttcatttttgttaactatcacaatgatgagttattagtaaggattggccgggtgaggtggctcacgcctgtaatcccagcactttgggaggcccaggtgggtgaatcacaaggtcaggagtttgagatcagcctgggcaaaatggtgaaatgccatctcaactaaaaattagccaggcctggtggcaggtgactgtaatgccagctactcgggaggctgaggtaagagaattgcttgaacctgggtggaagaagttgcagtgagccaagattgtgccactgcactcctgcctgggtgatagagtgacactccttctcaaaaaaaaaaaaattaaaaaacgtcataattattaatattattattattacaggcatgagccactgtgcttggcctgcctctgttttcacagacacatctcttcatactcagccaagggatccttcttcacatccatggtctctacattgctgtactcctcgtagactttactcattttttttgtgtgtatgaaattctggaatctacacaaggcatatttttgagtatatgcttgaaactagaaatcagaggccattttacctaagagatgtaaaactgctttcacctcaggccaccatactgctgattttttggatcttgttcattcttgtcccttgcccatattgtaatttgcatagttaaccttgggtcagtattttaccatttgctaaattagttccattttcctccaagctcaaaacttggtctatcccagtggaattatattcccacagatgtgcatgcacaaagttcactcctacgtgcccattcctgccctccacccttgccctccttttcctggccttgcttcacatggtacattgatttggatgcaaaatactgttgctttccagcctattgattttgtaatagtgaacaccccaatttccccatgagcccctcccctccaacactactctcactgagtaagtcaagaccttattcatccactggacaaaattataggaggccgcttaaatcagtgtgtgcagggcatcatgactcagcacatgatccatgagggatggcttcagaaccactgtcagcagcgcagctcagcgcttgtgtcccagctcagcccttgtatcccccttgatgtacttctatctgttctctctctctctctctctctctctctctctctctctctctctctctctctctctatatatatatatatatatatatatatacactttttttattatactttaagttctagggtacatgtgcacaacgtgcaggtttgttacacatgtatacatgttccatgttggtgtgctgcacccattaattcatcatacttctttctgttcttgtattttctgtgactggtcattttctgtactttcttggcagactactgtgcttaaaaacatgggatccttcaggcccatgatcaagtttgtccctcacttagcgtatgtgcaaattggggtcatgtacatgaacacactggcctgctgtacttatttgagaaataatgttaatttgcctccagatttttttttttttttgagacggagtttcgttcttgtttcccaggctggagtgcaatggcgcaatctcggctcaccgcaacctctgcctcccaggttcaagcgattctcctgcctgaggctcccaagtagctgggattacaggcgtgtaccaccacacccagctaattttgtatttgtattagagatggtgtttttccatgttagtcagactgctctcaagctcccgacctcaggagatccacccgcctcggtctcccaaagtgctggaattacaggcatgagccacggtgcctggctgcctccagggttttaaaacaaattaatgctattagatggcttcacatattgcaggttttatgctacaggctctaaacttcctttgtgtaataagatatgtcagccttccctgatgttgatgatggcatgctccttttcctgtctccctcatttcactgtcctgttagaaatagcttagactggctggccacagtggctaacacctctaatgccagcactttgggaggccaaggtgggtagatcacttgaggtccagagtttgagaccagtcaggtaatctcagcactttgggaggctgagactggtggatcacctgaggtcaggagtttgagagcagcctggccaacatggtgaaaccctttccctactaaaagtacaaaaattacctgggtgtggtgtaacatgcctgaaatctcagctgcatgggaggctgaggcagtaggatcatttgatccctggaggtggaggttgcagtgagccaagatcatgccattgcactctagcctgggcaacaagagaaaaactccatctcaaaaataaagaaagaaagaaagaaaaaatataaataaaagcaccagtcttattcatatgtagtcaacacccatgaccaaattctctcaaaggccccatctgcaggaacatccaattggagaataagaactctgaacatggcttttggccaatatgaacactcagaccagggagcctgcatcatattttttatgtttttattgtgcaatttgttttataaaatgttttctctgatcccagtttataaattttcccagtatacagtctgtgttttatatttcatgcatagtgaactacataactaagggcaatgcatgtacatagaattgctgtattgcctggctgttatataactgtagttgtgatatcataattgaaccctctgacactgttagtcaattctttttttttttggagacagagtcttgccctgttacccaggctggagtgcaatggcatgatctcggctcactgcaacctacgcctccttggttcaaatgattcttctgcctcaccctccagagtagctgggattacaggtgcctaccaccgtgcccagctaatttttttgtatttttagtagagatggggtttcaccatgttggccaggctggtctccaactcctgaccccgtgatctgccctcctctgccccccaaagtgctgggattacaggcctgaaccaccgcatcctgtcgttagtcaattcttactccttataatgctgtgtatttacttgaactcatacatcagaaggtagtgatcttaaatgtatttcagttcttatagtgtgtgctggtggtaagtagaagttgtggcttttttcttaagagggaattgtttagaggtctgctggctgtataaatgtacttattatttcgttgctagtcttatcatgggttacaatattttattaattaatttttatgattttacataaggcttttcagtaagtggtatgcctgggaaacatggtgagacccccgtttctgcaaaaaatacaaaaattagctgggaatgatggcacatgcctgcagtatcaactactgtggagtctgcagtgggaggatggcttgagcctgggaggtcaagactatagtgagctgtaatcatgctactgcactccagcatggttgacagagcaagatgctgtctaaaaaagaatacttattgtaaagtttgggtacaggaataatgaagtcattgatagtttatgaacaggctatggagttgatgcccaaaagaaataaacagtttgtaaatgaataacttattttgagttgtgacaagacaatgttgaaagtgatgcatgaagcggcaggcagaccatccacatcagttttacagaaaaaaagttaatcttgttcgtgctgcagtgaagagaacagcaaacaggagaaacaatagtcaggaattcaataatagcctggttaacatgatgaaaccccgtctctactaaaaatacaaagattagctgggcacagtggtgggcacctgtaatcccagctactcaagaggctgaggcagaagaattgcttgaacccgggaggcggaagtttcgatgagccgggatcctgccgttgcactccagcctgggcaacaagagcaaacctctgtctaaaacaaacaaacaaaaaggtctagccccctctcctcctttgtctgccatcatggtgtgtgcttgactccacttcttgtcatgtcttctcacaagactttcaggattaagcggtttctggccaacaaccaaaagtaaaatcgtccgatttcccagtggattcgaatgaaaactggcaataaaatcaggtccaactttaaaaggagacattggagaagaaccaagctgggtctataaggaattgcacgtgagatggcacacatatttatgctgtgtgagcatcataatcacgttacttaagctgaaaatgtcactaccatctggagacttggacatgttttattgggaatatatttttttctctctgaatctgttatgaacgcattggttgggtgggttcagtaataaacatgtgagacctttcatttcaaaaaaaaaattttaatgacataatagattacctaaatttctgttttgctttgttttgttttttgagatggagactccactcggttcagtggatcgcacctgttgtcctggcactttgggaggctgaggtgggaggattgcctgagaccaggagtttcctgggaatcttctcatcttccctaacccagttcatgaaagacccttggactttactgttagggaaaaaatctatataaaacaatatcagcagctgggagtgatggctcatgcctgtaatcccaacactctgagaggccaaggcaggtgaatcacctgaggttaggagttcaacaacagcctgaccaacatggagaaactgtctgtattaaaaatacaaaattaggcagggtgcgatggctcacacctgtaatcccagcactttgggaggccgaggcgggcggatcacgaggtcgggagattgagaccatcctggctaacacggtgaaaccccgtctctactaacaatacaaaaaatgagccaggcgctgtggcaggggcctatagtcccagctactcgggaggctgagcagggagaatggcgtgaaccctggaggcagatcttgcagtgagccgagatagcaccactgcactctggcctgggcgaaagagtgagactccgtctcaaaaaataaataaataaataaataaaaatacaaatacaaaattaggcgggcatggtggcacatgcctgtgtaatcccagcgactcaggaggctgaggcaggagaactgcttgaacttgggaggcggaggttgctgtgagccaagatcacgccaatgcacaccagcctgggcaacaagagcaaaactccatctgaaaaaataaaaaacaatatcagtgtgtcaaagcattatgtctgtcacaatacttgtgaaaggaaaatcaaaattactaaccaaagagaaaagtcaagctgggaactgtgttagacaaacctgcctcccattttattcctaaacaatatagctacaaggactaaaccaaaaatctacatactccactcacaaactgtgggcctcaagatctccaccccaaaatagttctgttgaatttcaccctggcaatgtaaactgagagcttatcttcacaggtgtaggaaagaacccatccctctgcacacctgagtcaaatgtctgtctgactacttcccctgacctattttttatgtaaaaattcagggtcactgagccagcctaaggcataagtgactattcctccaccctctctcacatataaattgtgtattcaatgaaaggttgatcaaagactcaaacaatgtgatcatttgttatctccctgtgacctggaagcccgcaattccagttatttcaccttcccagatcgaaccaaggtgtatcttatatgtattgattgatgtctcatgtcaccctaaatttgtaaattgcagcctgaacatcttgggcacacgtcatcaggacctcctgaggctgtgtcatgggtgcattttaaccttggcaaaatagatttctaaattcattgagacctagtagatacttttggatcacaagctcatgaacacagaaaagatcaagatagaataaggaaaaaatgagtataatggaaagcacaaatcagttccaaaatctcaactccttcatatttattcaccatagggaaatgctttacaactttgtgggattagagtccatttgtgaaagattttatatatatatatatagtttgttttgttttgttttttgagacggagtttcaatcttgttgcccaggctggagtgcaatggtgcgatctcggatcactgaaacctctgcctcccaggtactacggattctcctgtctcagcaccccaagtagctcagattacaggcatgcatcaccatgcccggctaattcttttgtatttagtagagactgggtttcattatgttagtcaggctggtcttgaattcctgacctcaggtgatccacctgcctcagcctcccaaagtgctgagattacaggtatgcgccactatgctgggccaaaagatatatttctagtattagattgaaataaaaacccattctatataactttagctaatttaaaacgcaaataatagataattacatagatacacaaaactttataatatttcacttagtattgctattactatgttcttggggcagaagctcagtctgtcagatacattacaaaaggatggtgtctccataattgtgcttaggactctggtgcataagtggataaactgttaaacaggatcctaggggagctagggtgacaaagttcaagtccattaaaactagcaacatacattccttactgctcacgcatgactcatggtcttaagatgtttacagttaagaaaagcagcttaatcatacctgcaaggacaaactcctacataaacacaatgtccagatgacccaatatcccatgacaatgtatgcttctaagctaattacagtcatgctttcacgtacttgcacactaaaataccaaggataggtgtttttttttttttgatggagcttcacttttgtcatccaggctggagtgcaataggacaatctcggctcattgcaacttccaccttccgggttcaagcgattctcctgcctcagcctcctgagtagctaggattacaggcatgcaccaccacccccggctaatcgttgaattttcagtagagacggggtttcatcacgttcgcaaggctggtctcgaacccctgatctcaggtgatgcccccacgtcggccttccaaagtgccagaattacaggcgggagccaatgcaaccggccaaggatagctttaaatcaacaaagtaataagttttgttacactgtcagcccactggcaggtagacataccttagtttttacctaagcacctatgtaagagaaactttaagagaaggcagttccctttgtttttgaggtcgccctactgtgtaactggtagttttcttttttttttctttttttttttaagacggagtctcgctcaggcttgagacaccttgtccagctgtattttttattattattattattattattattattattattattattattattttgtttttgagactgagtttcactctagttccctgggctggagtacaatgtcatgatcatggctcaccacagcttccattttctgggctcaagcgattctcctgcctcagcctccggagtagctgggactacaggctcatgccaccactccaggctaatttttatatttgtagtagagacggggtttctctatattggtcaggctggtctcgaactcccgacctcaggccatccgccgtcctcagcctaccaaagggctgggattacaggcttgagccaccgcgcccggcctgaagtagaatattttagaaagtaattaaaccttttttcagcataataacccagagatgtacttctgaaggacttagaatctcttcttgaaaggcaagcaacaagggagatagtacctgtaagtcagtaggaaattaaatatttcaaacatcagctatttcaaatttaaagctacagacttttaaataattcggaaccttgagaggaacgtggtcatgcaacctgagtccggtggcatgcaggcgcaacttctacaagttttcctggccaggcatgcaggctcaggcctgtaatcccagcactctgggaggctgaggcgggcggatcgcctgacgtcaggaattagaaaccagcctggccaacatggggaaaccccgtctctactgaaaatacaaagccattagccgggcatggtggcgcacgcctgtattttcagctatttgggaggctgaggcaggagaactgcttgaacccaggacgtggaggtcgtagtgagccgagatcacatcactgcattccagcctgggcgacagagcaggacgccttcccaaaacaaaacaaaacaaaacaaaatgtgctatacaatttagtttcctaatatcaattttaaaaagttttcgtgtaaataattaggaaaactaagcagccccagagataagacctcctggcatcattgtcccttcttatggagtgataatgtaaccttccttgaagtgtatcactccatcaccagtcaagctgccgcagcctatgcactggacttgaatggaaaatgtggtggttctgggaaagcttctctgtatttccttgtgtgtgtgaaatgttaatgtctctacttgggaacgctgaccccattcatttggagttgaggtttccaggtggctattctcatgctttgtgtccaaataaactctataattaataatgtattctaaatttcattatttactgctgacatcagtttctgttggattgtaggagcctcaccagagagggcacctgtccgccatgctgtaaaactcacacttgccaaaaatacatgggttagggtttctccccctccctcaggatgatgctagttagctgacacagatggtcacctccattaccaagtagagccaggatgaattatgtgtgaccaagggtgttgtcaagtcctcttccctgaggactgatcagtgtttatcttgaaaacatgtatttgggttgtatagaacagtgaagtttctttctctcttttcaacctctcaactgtcctctatttcccatcacatgctggtctaaggcctatttattaataaaatagtttttatttctttctctgttatcgtcgtgaagatgatttctcatttaggggaagatttttttagttttcaattgtattttctcaacatttaagagcgaagtgaagagtatttcttgggccaggcacagtggttcacgcctgtaatcccagcatttcaggaggccgaggcaggcggatcacttgaagtcaggagttcgagaccagcctggccaacatggtgaaaccccgtctctacccaaaatacaaaaattagccgggcatggtggcctgtgcctgtaatgccagctattccggaggctgaggcaggagaatcgcttcaacccaggaggcagaggctgcagtgagccgagatgtcaccactgcactccagcctgagcgacagagaaatactccgtcttaaaaaaaaaaagaaaagaaaaaaaagaaagtaatagatctcttccacaaatgtgctgggacaattaactggatatccacatggaaaagaataatgttgtatccctatctcacacaatcaaaattttattttaaaaattaaaagagacgatgaggggagccctgcgggagggtgtgttactttgtcgcccaggctggcctggacccccaggctcagtgatcctcccgcctctggccctcaggctcccgcccacctggccgcattcctgctatgtttaagcagtaggtggtgacttcactcctccctggcctgaacactccgtcgcgcatcccaggcggaggccctagggaagtctctgaagctgagcacagggtggactctccctcctgagtgaatggagaatagaaagggagaggatttctgttctgttctgtgggccgtcagcatgaaattgtacgttccgcccaggcagggctttgcattttacattcttgtttgcatccccgttccagacaattccagggctttcgaatcgtgcttcagccttcctgaccgctctcgcctccaaagcccgaaaaatagagtcgctgggagcgaggctgagagacgcacaggtcccgccccggccccgccctctgccggttctaaagggcaaggtctctccgcctggggccccgcctctacctcgatcaggccccgcccaccttctcgttggctccacccaggcctggctttagtcctgtgcgcacacatccgcgcagaccaggaagcggatcccgtggagtgaaggtcgcaccgcggcggtgagttttgctctgtgttgtattaagtctgcactccccatatccccggcacttccgtacctgggacgtggggtcaccacagacctgtaaattctcgcccatcttccttcaaccagagcaaatgcagacgttcccctgggaatccggaagtcgcttccttttgtgtttaaagtcgccctgaggctgttcccgtctccagtctttctgctacagggcgctgtatacacttcctatcgcgtagtttctgtgctcaaaaccgttttttaactcctccctccccgcgcttttcaaagtcctcacccgagatgtgtatttccgcctgggcgcctcccagtctcaacctttaggcgcctgaagcgcaaacgtcgcgatcccagtctcagggaggccgagttctctgcctggtgctgggatcttgtggaccccaccgaaggcgtcgtcgcaccccacctcccgcctcatgctgggccttgctgcaccccaagtctccccttagcagtcaccactttccttgagccagcgttggggaggtgccaggggccagtcctgtgacacggtgtgttcttgcctgcctagctccaacccctgaaaaatgagcctctctgggatgcaggcgtcttacttcaaaccctcctgtgattgtgtgggctaaagagatcaggagacagagagtagtagaaaacctgagacagagaaaagaagaatgagaaagacccataacagatggcaaagtagaggatgggtgagggatttgccaagagacagcaaaagtgaaaaaaaaaagataagaaagcaggaggagaaaagcaactggagaaatgtagagaaaagctagatgtacagagagatgaaggacagacagcaaggtagagaggggcagcaaagagggaggctcatcagagtgagagagagagagagagagaggaggaatttggagccagggcagacagagcagagtggtgctggtggcaaggagaacagagggagaaccacagcagggaggacgcctggggatctggggtgctagagagtggggacggggggtaaaacagagaagagagaatttaacagggagagcggcagagatgcagagatgggataagaggcggaaatatatggagattgaggacgatcgaagaattggggagaaggagcaacaagagattaaataagacgtgaggatggagcccaggtaatttttgtatttttagtagagacggggtttcaccatgttggccaggctggtctcgaactcctgacctcaggtgatccacccgcctcgacctcccaaagtgttggaattacaggcgtgagccaccgcacctggccacccaagcattcttgattgaaaaagtttgcttatgtcttagttctacagctgaccctctttccctgctttttgtttgtttgtttgcttgtttgttttgagatgcactttcgctcttgttgcccaggctggagtgcaatggtgtgatcttgggtcaccgcaaccctttttggttttttttttgagacggagtttcgctcttgttgcccgtgctggagtgcaatggtgcgatctcggctcactgcaacctccacctcccgagttcaagcgagtctcctgcctcagcctccctagtagctgggattacaggcatgtgccaccacaccaggctaattttgtatttttagtagagatggggtttctccatattggtcaggttggtcttgaactcctgacctcaggtgatctgcccacctcggcttcccaaagtgctgggattataggcatgagccaccgagcccggcctactcaccaccacctttacctcccggttttaagcgattgtcctgcctcggccttcctgagtagctggaattacaggcaagtgccacaacatctagataatttttgtatttttagtagagatggggtttctccatgttggtcaggatggtctcgaactcccgacatcaggtgatccgcctgcctcggcctcccaaagtgctgggattacaggtgtgagccaccgcactcagcctccctgttttgaaggtaactagctgtgtctttgtacatctgcattttataaatgttactgtaattttcttgtgaggaagaattaaatgttgggaatcagtggcatcagaacttgcaaaggaagtttctttatcccaggtatgtgaaagaggcttctctaattttcaaggatagttttgataaggccaaccctttcctttatcccttccaggccaccatgtaagaattccgttacatcttttcactcatctcagaccttctcagcgtgactcggtgaaaatgtccccgttctgaggatgtcacagctaaatctaaagcagatcatgtcagtccctggcagggaaccctccatgggcttcctgtgttccccaggacaaaagcccaactcctcactgtcactccacagccctgtgtccagggcccctgccactgtccaggctcctcctgggaacttgccctcatctcatgactccctctgccccagtcacatttgcttttctcttttcccaaacatcaaaacccttcccgtctcaggtcattttcactgctcttaccctatttctctaaatgctcacagcactgtccctttctccttcaggtcctggctcagaaatgtctcccatgccctcccacccccaactgaatttccctctgcccatcagtctctatcacattactcaggttttattatctctgtgtcagtcacatcagaaacacactttttttctttttccaaagagtctcgctctgtcctccaggctgtgagtgcagtcttgtgatcttggctcactgcaacctttgtctcctgagttcaagcaattcttgtgccttagtctcccaagtagctgagattacaggtgtgtgccaccatactctgctaatttttgtatttgtattttattttatttttgagtcttactctgttgccctggctggagtccagtggtgcgatcttggctcactgcaacctccaccttccaggttcaagcgatcctccaacctcagcctcccgagtagctgggcttaccaatgcccaccaagcccagctactttttgtatttttagtagatatggggtttcaccatgttggccaggctgctgttgaactcctgaacttgagtaatcctcccacctcagccttccagagtgctagtattacaggcatgaaccaccgcacccagccccaatttttgtgtttttagtacagacaggttttcaccatggtggccaggctggtctcaaactcctgagctctactgatcctccccctcagcttcctaagtagctgggaccagagacacacagacgtgcaccaccatacctggctaagtttttgtatttttggtagagatggggtttcaccatgttgcccaggctggtctcaaactcctgagctcaagcgatgtacccaccttggcttcccagagcggtgggatgacaggcatgagccaccgcaccgagcctctgcatgggatttggtcagggctgggtctgtgccctgaaagggagctcattccagcccagctccccactgctgcagcgtgtgagggcttctccaggagggaagcgagagttttcttatagaaatttattatccctggtgcagtgggcagcagaggtgaccatattttttcagagtgagggcacctttgtatgtgtcattgtgttacaggcaggaggtgtgttgattctgagcagtaaacaacatatttctaacattcaggattgacttctaaagacttggtacgtgaggaaaaaacacggaagaggaagaggaaagcaaaggagtcagggatggctcttcttcaggtgagatgatattctcgggggattgttctgtctccttcctttcagaaatgctgatcttggagttgggaatcttctctgagtctcaagtgtcctgcctgacaggtttgctcacactcaactcatgccttccctcagtccctgtcatctcacttagattccatctcttgtgactgagtgacatgaacttgggaagaggctgcactgggcatggtcctgggaagggctcacacccagacatgtatggagatggggtgagggtcccgcagtgtcagtgctgttgggcagcagggattgttcaggggccacatctggatgcactgtcaactctctgtggaccaggattagagcagctgccaatggaagtgacctattaatgtgcacaaagtacgtggtaaattctagaaaaggagaccaataagggaaaatcttttctccctaattttataccacatttttaggtaattgagtgagttactgtgtttctgactcaaaaaattgtactaattagaatggaaagttcataaacagacatgaatgatacaggggttttattccatccttatttaaagaatatgaaatcaacctaaataatagcaggagatttattaaaccattcttagcaaattaagctgatggagacagtggtgttactgtggagaggcttttgaaacaggtgttttttgtaaaaatggttacaatttttctcaaatatgggagcagtacttgcagctgccaaattatccttttccaccaagatgagattcctcttcagttaaacaaaatttgcatatatatatatatttgtgtttgtttgtttgttttttcgagacggagtctcgctctgttgcccaggctgtagtgcagtggcacgatctccgctcactggaagctccgcctcccaggtttacaccattctcctgcctcagcctcctgagtagctgggactacaggcaccccccaccacgcccggataatttttgtattttttagtagagacggggtttcaccgtgttagccaggatggtctcgatctcctgaccttgtgatccacccgcctcagccccccaaagtgctgggattacaggcatgagccactgtgcctggcctactttttgtatttttaaaacctttatatatatacacacaaccccatacatatacacacacatatatacatacacatacatatatacacacacacatatgtatatattttgaaaatctgagacaaatgacaacactttgtattaacgtggttttttgtgagtgtgtgtaggttttattttttttttaacatatacaaaatagaattttgtacttcgattaattttattttcatgtattttattttattttgagagagagtcttgctttgttgcccaggctagaatgccttggtgcaatcgcagctcactgaaacctccaccatcaaggtcaagccgtcctcccacctcagccttccaagtagttgggacaacagatgcctgccaccatacccggctaattatttatttctaacgtaagcaattcatactgagagggtatcctgagctcttcagaaagtataatcaaacaccactgggaagacatcatgtggtgaagaatcccttacttggatttgtcggaacattctctgcaattaaatccatgctttcccctctcctcttctcattttctgtaaagataagatctcctcccataaccatttgcttaaaatgtgttttcctttcagggtctactgacattcagggatgtggccatagaattctctcaggaggagtggaaatgcctggaccctgctcagaggactctatacagagacgtgatgctggagaattataggaacctggtctccctgggtgaggataacttccctccagaagtggggatgtgcccttgtggatctttgtattttctcttgttgcctcttgggagccacatccttgcttggctaaaatggaagccgtattgagttagaaatgaaaagcttcatgatgtagcatctggactttcactgtcccctttagatgttctgcattcttcatgatagctcagtgggggttccagaagtaaagtaagcataaaagcttatggcaggccaggcgtggtggctcacacctgtcatcacagcactttgggaggctgaggcgtgtggatcacttcaggtcaggagttcaagaccagcctggccaacatggagaaatcccgtctctactaaaaacacaaaaattagccgggcgtcgtggtgcatgcctgtaatcccagctcctagaaaggctgatgaaagagaatcgcttgatcccggcaggccaaggttccagtgactgagaacacaccactggactccagcctgggcaacagagcaagactctctctcaaaaaacaaaaaaacaaaaccttatggcagactttaatcatatccagtttcctgtttgcttttcctgtgctttcgattcagtagttcttggaagagagcttgatgtccacatattacatgttacagtgctctccaagcattcagaaggaggcagtcagtggagcaattagtaaaatattttcctagatccacctgtaatgtcttctttcctacagaaatatagggctgggactctacaaaagctccagcacgtcttagtactttctttttataagcaggagtctcatgctgatatgttatctccatgttggagcaagagaaagggccctggactgtggagagtgaagtgaaaatatcaaaaaactccagatgggtgggaatgtattataggtgtaaatgcaggtaagagctcagatgggcagagtggaagctccaccttcaaatagtgtgtggggaaactctgcaagtgggagaattctgttggaaaaggaaagtttcaatcctgagatctctgaaatgacatctttctttgcccccacttatccctctgctcttcctttctttctttttcttattttatgaaagagtctcactgtgttgcccaggctacagtgcagtgatacgatcttggctaacagcagcctccacctcccaggctcaaaggatttttgtgtcccagcttcctgagtagctgggactgtaggcgctcaccaccatgcccagctaatttttgtgtttttagtagagacagggtttcaccatgttggccagcctggtctcaaactcctgatctcaagtgatccacctgccttggcttcccaaagtgtggacctaagattacctaggtgccaaggcaagagactgaaggcacaaagtgtttcagtataataaagaaaatagttacaataagaagagtcataatacaaattagatacagagatgatcatggacaattatcaatcattagcttttaatattactctttgttgcattattaatataacctaggaataactggcaggtatagggtgaggtgctgaagggacatggtgagaagtgacctagaaggcaagaggtgagccctctgtcacacccgcataagggccgcttgaggggtccttggtcaagcggtaacaccagtgtctgggaaggcacccgttacttagcagaccgcgaaagggggtctcctttccttggaggagtcagggaacactctgctccaccagcttctcgtggaaggctggatagtatccaggcctgcccgcagtcatccggaggcctaaacccctccctgtggtgctgtgcttcaatggtcatgctccttgtctactttcatgctcctcccgtactcctggctcctctttgaagttcatagtagatagcggtagaaggaatagtgaaagtctttgatctttcttagaagtgcatagaagagccgggcgcagtggctcttgcctgtaatcccagcactttaggggtccaaggcgggcagatcaagaggtcaggagatcgagaccatcctggctaacatggtgaaaccccgtctctactaaaaatacaacaaattagctgggtgtggtggcgggcacttgtagtcccagctactcgggaggctgaggcaggagaatggcatgaacccgggaggcagagcttgcagtgagccgagatcgcaccactgcactccagcctgggcgacagagtgagactccgtctcaaaaaaaaaaaaaaaaaaaaaaaaagaagtgtatagaagaaaacgctaacgtatgctgccttctctctctgctttggctacctaaaaggcaagggccccttgtcctatgatcacgtgacttgcttcaccttatcaatcacttagaagattcaccctccttaccctgcccccttgtcttgtatgcaataaatatcagcgcacccagctgtttggggccactacctgtctccgcgtcttgatggtagtggtcccccaggcccagctgctttctctttatctctttgtcttatgtctttatttattacaatctctcatctccgcataagagaacacccgctaagcccgcagggctggaccctacaccaaagcgctgcgattacaggcgtgagccgccaagctcaactattgttattattttaaacagttttgtcttttagttctttgtaaacatgtaaatggtttaaacatgattccagtgtgaatataacaactacgttagcgtccatttcttttatttttgttgaaacggagtcttgctctgtcgcccaggctggagtgcagtggtgcgatctcggctcactgcaagctccacctcccgggttcacgccattctcctgcctcagcctcccgagtacctgggactacaggctcccgccaccgcgcctggctaatttttttgtatttttattagagacagggtttcaccgtggtctcaatctcctgacctcgtgatccacccgccttagcctcccaatgtgctgggattacagacgtgagccaccgcgccccgccgtgcccatttctttcagtaaacagaaatgaagtgtgttgtatagataaaataaaaaggcatgaaaaaaacactgtacatatatgttaccagaaatgcaacatacacagaaataattccgacaaaaataaaaaaagttctagaggagaagtagttttgggaagtggttattgttgcaggtatgttaaagatcttaaagttggccaggcgcggtggctcacgcctgtaatcccagcactttgggaggccaaggcgggtggatcacctgaggtcaggagttcaagaccagtctcaacatggagaaaccccgtctctactaaaaatacaaaattagccgggtgtggtggcgggcacttgtaatcccagctactcgcgaggctgaggcagaattgcttgaacctgggaggcgggggttgcagtgatccgagattgtgccattgcactccagcctgggcaacgagagcgaaactctgtctcaaaaaaaaaaaaaaaaaaaaaaaaatcttaaagttatagcataataatgaaacctaaaattttcataacctggccaggtgtagtggctcatgcctataatcccagtaatttgggaggctgaggtgggcagatcaccagaggtcaggtattcaaatccagcctagttaacatggtgaaacttcgtctctagtaaaattacaaaaattatccaggcacggtcgtgggtggcagtaatcccagctactcaggaggctgaggcacgagagttgcttgaacccgggaggtagaggttgcagtgagctgagatcgcaccgtcgcactccagcatgggagacagagtgagactccatctcaaaataaataaataaataaataaataaataaagtttcataacctgcaaaaactacttctcctctagaattattattattatttttttagatggagtctcgctctgtagcccaggctggagtgcagtggcacgatctcagctcactgcaagctccacctcccggggtcacaccattctcctgcctcagcctcccgagcagctggggctacaggcgcctgccaccacacccggctattttttattgtatttttagtagagatggggtttctctgtattagccaggatggtctcaatctcctgaccttgtgatccatccacctcggcctcccagagtgctgggattacaggcgtgagccaccgcgcccagcctttttagaaatttttatttttgtcagaattatttctgtgtatgttgcatttctgctaacgtatatatacagtgttttttcatgcctttttattttaaaaaatttagttctgaactgggattacaggtacccaccaccgtgcccagctaatgtttttgtatttttagtagatatggggttgcaccatgttggccaggctggtgtcgaacttctgacctcatgattcacctgcctcagacccccaaagtgctgggattacaggcatgtgccaccgtgcccggacattagtcaattcttattccttatagtgctgtgtatagttttgacctcatacatcagaaagtagtgaccttaacatgtatttcaattcttatgttgtgtactagtggtaagtacaagttgtggcttttttcttaatagggaattgtttacaattctgcaggctgcatacatgtacttattattttctggcttgttttatcaagccagaaaatatttatcaatattttattaactgatttttatgactttacctgtgagttttcagtatgtgatatgcaatataactgacacactccactcgttactgtcacaaagtgctgctgggcacagtggctcatgcctgtaatcccaggacttcgggaggctgagacatgtggatcacctgaggtcaggtgtttgagacaaacctggccaatatggtgaaaccccatctctactaaaaatataaaaattagccgggcatgatggtgcatgcctgtaatcccagctactcaggaggctgagcaaagagacttgcttgaacccaggaggcagaggctgcagtgagccaagatcatgccattgcactctgtccagtgacagagtgagactccatctcaaaaaaataaaaatacaaaatttttaaaaaaaagtcacaaagtgcctgttccacatggatatagataattttgtaacagttatttagaaaaatacggtgttaacatttttctttttgagaggtagtctcactctgccactcagggtggagtgcagtggcacaatctcagctcaccacaatcttggcctcgcgggttcaagcaattctccttccttagcctcccaagtagcttggattacaggtgcccaccaccacacctggctactttttgtatgtttagtagagaagaggttttgccatgttggccaggctggtctcgaactcctgacctcaggtgatttgcctgtctcggcctcctaaaatactgggattacaggcgtgaaccaccatgccctgccttgtttctttagagatggagtctcactttgtcacccaggctggagtgcagtggttcgatgttggcgcactgcaacctttgcctcttggcttaaagcaattcttgtgcatcagccgcttgagtagctgggactttataaaggcgtgggccaccacacctgcctaatttttgtaatattttcttatcttctcagtgctatgattctttgacaatacagaaattccattgattttgattatccttacaggagcttgttgtggattatttaccaaaatagtaccttgtctggttttttagcatttatttatttacactaagtaccctataaatatgaagaatatatatttttctcttctttgatgtgacagtgatacgtcttttgcaaagtgtgatacactttagggtcacagtagaaaaacactcctgactttaggcttacacatgtttgtgccctgtcagtgtttcgtcatgatattggaaataggcttccataaaaatgatttgaagcacatgcaatcaccctttatttattaaaggatcttactccttttgtgttcctaaactttgaagatcatgtttgggaagtttaaaataagtattgttttttatgtaatatttacacatttcagtattgtataacttccgtacttaatttgaaacctatttgtgtttatattttgtagatacctcttccaaatgcatgatgaagatgttctcatcaacaggacaaggcaatacagaagtggtccacacagggacattgcaaatacatgcaagtcatcacattggagatacttgcttccaggaaattgagaaagatattcatgactttgtgtttcagtggcaagaaaatgaaacaaatggccatgaagcactcatgacaaaaaccaaaaagttgatgagtagtacagagcgacatgatcaaaggcatgctggaaacaaacctattaaaaatgagcttggatcaagctttcattcgcatctgcctgaagtgcacatatttcaccccgaagggaaaattggtaatcaagttgagaaggctatcaacgatgctttctcagtttcagcatcccaacgaatttcctgtaggccaaaaactcgtatttctaataagtataggaataatttcctccagtcttcattactcacacaaaaacgggaagtacacacaagagaaaaatctttccaacgtaatgagagtggcaaagcctttaatggtagctcactcttaaaaaaacatcagataatccatttaggagacaaacagtataaatgtgatgtatgcggcaaggactttcatcagaagcgataccttgcatgccatagatgtcacactggtgagaatccttacacgtgtaatgagtgtggcaagacattcagtcacaattcagccctgttagttcacaaggcaattcatactggagagaaaccttacaagtgtaatgaatgtggcaaggtttttaatcaacaatcaaaccttgcacgtcatcatagagttcatactggagagaaaccttacaaatgtgaagaatgtgacaaagttttcagtcgcaaatcacaccttgaaagacataggagaattcacactggagagaaaccatacaaatgtaaggtttgtgacaaggctttcagacgtgattcacacctggcacaacatactgtaattcacactggagagaaaccttacaagtgtaatgagtgtggcaagacctttgttcaaaattcatctcttgtaatgcataaggtcattcatactggagagaaacgttacaagtgtaatgaatgtggcaaggtttttaatcacaaatcaaaccttgcatgtcatcgtagacttcatactggagagaaaccttacaagtgtaatgaatgtggcaaggtttttaatcgaaaatcaaaccttgaacgtcatcatagacttcatactggaaagaaatcttagaagtgtaaatttgcaaggtttttaggcaacagtcaaaccttgcatgtcatcatagactttatactggagagaaaccttacaaatgtgaagaatgtgacaaaagttttcaatttcaaatcactccttgaaatacataggagagttcatactggagagaaaccatacaaatgtaaggtttgtgacaaggatttcgggtgtgattcacacctggcccaacatactggaattcacactggaaaggaactgtacaagtgtaatgagtgtggcagagcctttggtggtcagtcaacacttactcaccatcaagcaatccatggtatagggaaacttgactaatgtaatgattgtcacaaagtcttcagtaatattacagccattgcaaaacattggagaatccataatgaaggaggtcttacaagtgtaataaatgtggcaagtttttcagacatcattcataacttgcagttcattggcgatcttatacaggagagaaatcttacaaatgtgatgattgtggcaaggtcttcagtcaagcttcatcttttgcaaaacgggagaattcatacaggagagaaacctcacaagtgtgatgattgtgagcaaagcctttacttcacgttcacaccacattagatatcagaggatccatactggacagaaatcttacaaacgtcctatgtgtggcaaggtcttcagtccgaggttactccttgcagaatatcataacgttcatttttgaggtaatagttacaaatgcggtgagcacagcaaaccatcaaggattgacagtagagtcaattcagaattgacttgagtttgagttgacttaaaacattcagttgaagcattaattgacattaaagtgtttatgttaagaggattgggccaggcgtgtggctcacgcctgtaaatccagcactttaggagcccaaggtggatagatcacttgaggtcatgagtttgagatcagcctggccaacagacgtgagtcacttttcccagcctgctttttgtttctttaacaaaaaccaataggggtttttataggtattgtgttgaatctgaatcacattggcttatataataacaatattgatttttccaaaccatcaatgtgggttgtatatatatgtttttaatcattttggttaatgtttgtagatttcaaggtgtgaaattctcagtttttttatgtttattcctaagtatttcttactttaagatctctagcaaatggaagtgttttttaattttcgtttaaattttttattgtttatggaaattcaattaatttttggtgctgctattgcattgtgcaaatccactgaatgtgttgattagttccagtagtattttggttgactcaggccccgcccacctcttcgcctcccgtctggcctgacccaggccccgcccacctcctcgggggtctccccgcgggtctggcttctgtactgtgctgattggcacagacccggaagctgatggcatggactgaaggttgccccgttgagtttgcgcttcccagttctctggtactgctataccggggacgtgggtgtctccacagacctggaaattccggcccctctttctcaactcagagcaaattgagacgtccgggtgggagtccgtgagtcttttccttttgagtttaaagtcgccctgaggctggtcccgtcccggtcttttctgcagtagggccgtgcagacacctcctgtagcgaaactttccttctcaaaacccttcccgacccgtcctcccgcctcgcgctgtttcaggtcctcaccagcgagttggactctcgccctgggctcctcatcggcgcctggagggcagcgctgcagccccactcccgggaaggccgcgtcctctgcctggtcctgggatcctgcagaccccacccctgtccgaaggcgccatcgcccaccacctccctcctcgtgccggccctgcttctccccagttccaaccccaggaaaacgtgcttctcctggaggcaaccctctttttccaccctcgccctgttgttcccggaaggcaggcctggaatgtgaagtttccaggtagatggatattaaacatagaattgaagaaaaaaaaaaaaaccccacaaagtaacaaaagaatgaagcggcgaaagcagaaatttactcaaccaagaaagcaccccacagggtgggggtgggcccaagcgagcgtctccagggccccatttacaaagtttttggaggttatttttttttgaggtccctatgggctaccccttatctggatgaagaatttggcccttggccaaggaaataactgaggtaaattggcctgaggccagagcagatgggtgccctatgcagatgaaggggtggccggtgcttggccttggccactcctgggctctttctctttccacctgcgacctggtggaagggggagggtgttagggagagtagcctttgatcctttgttactttgggtgggaagatggggtttttccttttagtctagttttggaaagttcgcgttaattggttttagattccctgcctccctagacccaggacccatgtggttttttttgtttttgtttttgtttttttgatggagatggggtcttactctgctgcgcaggccgaagagcggtgaccggatcacagctcactgcagcttcaacctcctgggctcaagggatcctcccacctcagcctgcagagtagctgggaccacagccgcgcgccaccacaccgcgccaatttttgtgttcttggtagagaccgggttttgccttgttgtctaggttgggctccaactgcagggctaaagcgatccaagagcatcagcctcccaaagtgctgggattacaggcttgagccaccatgcccgccttatttcttaatttaaaaaaaaaaatgtatatgtagactgaacgcggtggctcatgcctgtcatcccagcactttgtgaggccgattctcctctatccaggagacgggtttcaccattttgccaggtttgtctcaaactcctcggcttaactgatccgcttgctttggccttccaaagtgctaggattacaggagtgagccaccacacgtagccagtcctggcattttgtagaaggatggccaacgcagcctgttgacccttcctggccatcacatgaaaatcagcgactcttccttcttacaaaactcggagcttctcaggataacttggtgaaacgtcccccgctgtgaacctcagtgagcccacctgtaatatacaggtgagggagaagaccagaaaagctcagtcagagtgacactgacccctgaaatgatgggcacaatggagtgtgtggcttttcctgtaggacagggaggtatttagttgtagtttgaactttaaaggattccagtcctccgaaaaacaggattagactcaaatcaccttgaaccttatcatctcatggctttgacccacctacatggctccgtgtcccctgcaggcctcgccccggagctctacaatcctgtgtgcagttgtctccgcagctctctgctgggacatcaaacaggcatctccaccttcatgtgtctataagtgacttcctaaacccccaaacacattcccttacagtcctacacatctcagatgagggtgacagtgtacttctgggtgcttagctgaggttgacaccatgtattttaaatatggaaaataaattacattatttgtaagtgttgtaatttataatgtaaagagaaaattacatgtatacatgaaaggagtgagaaagtacatcatttccaaatttattttgaggtgtgggagaaaaatgtttcaaggcctcatccttagggatctgtgctcccgggacccctctgacttcatctcctgcctgtgtcctcctcactccctctgctccagccatacaggcctctttcctttttctgggactgaggttgctcctatctcagggacttctcctgggctgtccctctgcctaggactctctggcccctcaactgcaagtgacaagcagcctttcttccctaagtctttgttctgatattactttctctatggaaacctttgtgatctcccacagccccccacttgacattgcagcgccaccttcacccccacctctggtccatgttgcctgttctgtgtgattcttttagctccttcaccgttcactggatcctggtgagaacaagtccgtaagcggagagcagaatcagaaggtggggctgtgctgggctggcgccatctgagtggagctcaaccctgacttcacattacagttttcaggcattttgcaaatatatcttttgttctgttttatcaaagattgctattatcataggatgggacacaccctcaataatacaatggcactggtgattctcatctgtgtccagcattgaacatcaaggcagtttcctccatattgagaactgagatcagcctgtgatccacagggaggtgagggggctgtgctctgcatggggtttggttagggccagatctgtgtcctgaagatctgtgtcttgctgcatcgtgtgcgtggacttttccatcaggggagcaaaatccaaaaacaagtcaaaattacccttgtaggtcttcctgtgggatgtccttatgtctgcataatctctggtgcagtgggcagcagaggaccatctttgtccctggtgaggtctcccctgtgtgtgtgttttgtcacaggaaaggagggagtgatttctaaacactaaatctcagctgggtgcagtggctcacatctggaatcccagctctttgggagggttgggtgggcagatctcaaggtcaggagatcgagaccatcctggccaacatggtaaaaccccatctctagtaaaaatagaaaaattagctgggcctggcagcgcatgcctgtaatcccagctacttaagaggctgaggcaggagaatcactagaaccagggaggcagaggttgcagtgagctgaggtcatgccactgaaccacattcttgtgacagagctagacaccatctcaaaaaaaaaaaaaagaaaaattaaatctcatatttttttacacacaggattgatttccaaagactcatgctatgtaaggaagccaccaagaagggcaaagaaaaggagccagggacggctcttcctcaggtaaagtgatattcctcggtggattcttctgtctccttgttttcttaaataccaggtattgtggtagccagtcttctgtgattctgaagcgtcctaactcacaagtttgctcgcactcacccatgccttttctcagtccctctcatcttaaattccatctgcctctattgcccaggctggagttcactggagcaatctgggctcactgcaacctccacctcccagggtcaagcgattctcatgcctcagcctctcaagtatctgggattacaggtgtccaccaccaggcttggctaattttgtattttttgtagagacaggttttcaccctgttggccaggctggtctcaaacccctgacttcatgtaatctccttgacggtttttcactgttaccaagaataacacactggctgcctgtgagcatggtgacttcactgcagatatctggagaattcctgcaaaactgattacttctttttggatttgctatttcctcttttacatctgggaagattccatccagacccccagctgcagaggtgccctctctgactgagaacatgagaaatttctcactcttttaagcaaatcttactcctgtggtcttaccaccatgttcttttttgcattcggtgaaaatgaaagccctttttatttatattttctattccttgagagtctgagtagatgtcattaatcatggacttgtatatttaaaatagattttaatactttgctgagcatacttttcatgtgttttgagagctattttgtattctttagttctttatttttgccctggtgttttgttcacattatgcatttttttaggataaaacagaaacgttctttcacatgcctgctttttttttttttcttttaagacggagttttgctcttgtcacccaggctggagtgtaatggcacgatcttggctgactgcagcctccacctcccgggttcaagcagtttttctgcctcagcctcccgagtagctgggatgacaggcaggtgccaccactcccagctaagttttgtatttttaagagagatggtgtttcaccatgatggccataatttcttttggcttctgaaattagaaatttttggccattaatatcttccaacaggcttttctattcctttcttcctctcactgtcttctgggacttctggtactttaaaaaaatttttttgagatgaagtcttgctctgttgccaggctggagtgcagtggtgcaaactcagctcacctccagcctttgtcacctgggtttaagtgattctcttacctcagcttcacaagtagctgagattacaagtgcgcaccactacacctgcctaattgttatatttttcatacagacagggtttctctatgttggtcaggctggtctcgatctcccgacctcaggtgatccacccaccttggcctcccaaagtgcagggatttcaggcatgagccaccgtgcctggcctgttttttttattgtttttttttttttgagacagtcttgctctgttgcccaggctggagtacagtggggcgatctcagctcactgcaacctctgcctcccatgctcaagtgcttctcctgcctcagcctctagagtagctgggactacaggagctcaccaccacaaccagctaatctttgtattttcagtagagacagggttttgccataatgaccaggctgttctgcaaactcctgacctcaggtgatccacccacctcggctttcaagtcctggtgtgagccaccttgccagtcccctcttcactaatttttaatttacataatgaattctgattttgaacccatgtattgagtttttctacttagttactgtatgtttagccctagggtttctgtgtagttcttcataatttccatacgttggttgaccttctcattttcttcatgcattgcttttatgatttcttgaagctgtctcttaactcaatgagtttccaacattgtttgggttggaggtgatggggtctcactgtgtccctcaggctggaggacagtggtacaatcttgggtcactttatcctctgctctccaggctcaagcgatcctcccacctcagcctggcatgtatctgtggatgtgtcctctctaggtttttgcttataatctcctaactgaagttaatttaagtgtgtgtgggtgtgatttgtagtgtgtacaggagagcattaatggagaagcctatgattttttgtttgtttgttttttgagacagtctcattctgtcatcaggctaaagtgcagtggcgccatctaggctcacttcaacctccacctcctgatttcaaaagattctcctgcctcgccctgctgagtagctgggactacaggcacgcaccaccatgcccagctaatttttgtatttttaatagagacggggttttaccatgttggccaggatgctcttgatttcttgacctcctgatccacccatctcggcctccataagtgctgggattataggtgtgagccaccacgcctggccaagcccatgttttatgtagaaaatacattattttcagtatatatatacatatattttattttgagagtctcactctgttgcccaggctggagtgcagtggtgcgatctcggcttacagcaacttctgcctccagagttctatcgatttttctgcctcagcttcccaaatagctgggattacaggcgctttcccccaccgtgcctagcaaatttttatatttttagtagatacaggttttcaccatgttggccaggttgttcttgaactcctgaccttaagtaatccacccaccttggtttcccaaagtgatgggattacaggtgtgagccccaatgcccggccatatatatatatagtttgtttgttttttgacagagtctaactctgcagcccaagctgagttgcagtggcacaatctcagctcactgcaaccttcgcctctggggctcaagcaattctcctgcctcagcctcccaagtacctgggattagaggtgggcaccaccacacctgtgttcaagcaattctcctgcctcagccttcaagtagctgggattacaggcaggtgccaccacgcccagctaagttttgtacttttagtagagatggggtttcaccatgttaccctggatggtctcaaactcctcaagtcaggtgatccacctgccttggcctcccaaagtactgggattccaggcctgaggcactgcacctggccatatattttttatattgtccataaaactgagacttccacagtgacttaggggattttaaaatctatcaaggaaaagtgcaataaaatgcaactatacagaaaaaactgttcaaaaataccttaatgcggctttgtcagaacaccgtcttggatcaaatcgatacttattttctcttttctcatttcatgtgaaggtgatgactcactcctccctaatgttttgttgaaatctgtctttcattttagggacactagactttcagggatgtggctatagatttctctttggaggagtggaaatgcctgaaccctgcacagagggctttatacagggaagtgatgttggagaactacaggaacctggagtttgtgggtgaggaaaatatccctccagacatgaggaatctgcccttgtctatcttggctcttcctggttttgtattctcttttgtgatgttgccccatacatgcttttcatgtacatgtcattgttttctacagtgatgaccctcatatttgtcatggacagcttcttagagactcccttatggagtggttttacataaaaccagaaaattcatgaagaacactttgactaataagattgaacatcatcctgctctaggcagagatgcccctggaggccctgagcggaattgtcaccatggcccaggatatgagatagaaagcatcacactgactgacaagtgtttccagctgcgcttgtggttttgtgttttttgtttcattttgtttttatgagacagagtgttgaacaggttggagtgcagtgtcgtgatctcagctcattgcaacctccaccttctgggctcaagcaattcacatacctgagcctcccaacctaactgaaattacagatgcatgtcaccatacctggctaattttgtattttttttatttttattttatttttattttttttattgatcattcttgggtgtttctcacagagggggatttggcagggtcacaggacaatagtggagggaaggtcagcagataaacaagtgaacaaaggtctctggttttcctaggcagaggaccctgcggccttccgcagtgtttgtgtccctgggtacctgagattagggagtggtgatgactcttaaggagcatgctgccttcaagcatctgtttaacaaagcacatcttgcaccacccttaatccattcaaccctgagtggatacagcacatgtttcagagagcacagggttgggggtaaggtcaccgataaacaggatcccaaggcagaagaatttttcttagtacagaacaaaatgaaaagtctcccatgtctacctctttctacacagacaccacaaccatccgatttctcaatcttttccccacctttcccccctttctattctacaaaaccgccattgtcatcatggcccgttctcaatgagctgttgggtacacctcccagacagggtggtggctgggcagaggggctcctcacttcccagtaggcgcggccgggcagaggcgcccctcacctcccggatggggcggctggcctggcggggggctgacccccccacctccctcccggagggagcggctggccgggcagaggggctcctcacttcccagtaggggcggctgggtagaggcgcccctcacctgccagatggggtggctggccgggcggggggctgacccccccacctccctccgggacgaggtggctgccgggaggagacgctcctcacttcccagacggggtggctgctgggcggaggggcttctcacttctcagacggggcggctgccgggcggaggggcttctcacttatcagacggggtggctgccaggcagagggtctcctcacttctcagacggggcggccgggcagagacgctcctcacatcccagacggggtggcagggcagaggtgctccccacatctcagacgatgggcggccgggcagagacgctcctcactttccagactggacagccaggcagaggggctcctcacatcccagacgatgggcggccaggcagagacgctcctcacttcccagatggggtggtggccgggcagaggctgcaatctcggcactttgggaggccaaggcaggcggctgggaggtggaggttgtagcgagccgagatcacgccactgcactccagcctgggcaccattgagcactgagtgaacgagactccgtctgcaatcccggcaccttgggaggccgaggctggcggatcactcccggttaggagctggagaccagcccggccaacacagcgaatccccgtctccaccaaaaaaatacgaaaaccagtcaggcgtggcggcgcgcgcctgcaatcacaggcactcagcaggctgaggcaggagaatcaggcagggaggttgcagtgagccaagatggcagcagtaccgtccagcttcggctcggcatcagagggagaccctggaaagagagggagagggagaccatggggagagggagagggagaggggactaattttgtatttttattagagatgggatatgaccatgttggccaggctggtcttgaactcctggtctcaagcaatccgcctgcctcagcctccatccaggtgttgggattataggcatgagccaccgcacctggccttttgttctgttttttttgttttttgttttttgttttgagacagagtttcactcttgttgcccaggctggagtgcaatggtgcgatctcggctcactgcaacccccacctcccaggttcaagcgattctcctgcttcaacctgcctagcagctgggattacaggcatgtgccaccaagcccggctatttctgtatttttaatagagacagggtttctccatgttggtcaggctggtctcgaactcccgacctcaggtgatctgcccaccttggcctcccaaagtgctgggattacaggcatgagccaccgcacctggcccgttctggtttttgaggagcatcacagaagcatctttcactggcactgtgacagtgttcatcacataaactaatgatcatcttctctaagcagcagtcactgctgtagaaattcctcctacggaggacatcattcaggctcactgcctcatatataggaggctcttgactgaactctttttttctggacatggaattttgctcttgttgcccaggctggagtgcaatggcatgatctccactcactgcaacctccgcctcctgggttcaagtgattctcctgccttggtttcccaagtagctggaattacagccgcccaccaccatgcctggcaaatttttgtatttttagtagagataaggtgttcttaaactttgaagatcacttttgggacgtttaaaataactgttgctttttgtgtaatatttacacatttcaatattaactattatttaccatctgtacttttttttttgagatggattattgctctgtcacccaggctggagtgcagtggcatgatctcgcctcactgcaagctctgcctccagggttcacgccattctcctgcctcagcctcccaagtagctaggactataggcacctatcactacacctggctaatttttttgtatttttagtacagatagggtttcaccatgttagcgaggatggtctcgagctcctgaccttgtgatccacctgcctcgtcctcccaaagtgctgggactacaggtgtgagccactgcacctggcctaccatctgtacttaattggaaacctattggtctttatattttttagatagctctttaaaatccatgatggagttctcatcaactgggcacggtaatacaggagaagtgattcacacagggacgttgcaaatacatgaaagtcatcacactggagatttttgcttcccagaaatcaagaaagatattcatcactttgagtttcagtggcaagaaatttaaagaaatggccatgaagcacccatgacagaaaccaaagagttgacaggtagtacagactgacgtgatcaaagacatgctggaaacaagcctattaaagatcagcttggatcaagctttcattcgcatctgcctgaactccacatgtttcagacccaagggaaaattggtaatcaagtggagaagtctatcaatgatgcttcctcagcttcaacatcccaaataatttgtaggctcaaaacccatatttctattaagtatgggaagaatttcctctattcttcattattcacacaaatacaagaagtacacatgagggaaaaacctttccaatgtaatgagtgtggcaaagcctttaatcatagctcatgtttaaggagacatcacgtaacccattcaggagagaaacagtataaatgtgatgtatgtggcaaagtctttcatcagaagcaataccttgcatggcaccatagtgttcatactggagaaaaaccttacaagtgtaatgagtgttccaagaccttcaatcagaagtcatcccttcagtgtcatcatagacttcatactgtacagaaacattacaaatgtgaagaatgcaacaaagtttagagttgaggatcacaacttgaaacacacaggagaattcatactggagaaaaaccatacaaacgtaaggtttgtgacaaggctttctgggataattcatgcctttcatgccgtaagagttcatactggagagaaatgttacacatgtaacgaatgtggcaaggcttttagtagaaaagcaaaccttgcacatcatggacttcatactggagggaaatcttacaaatgtaagggttgtgacaaggttttccaccatgatttatgccttgcacaacatcagagagttcatactggagagaaccttacacatttcacgagtatggaaagacctttgctcaaaattcagcccttgtaatgcataaggcaattcatactggaaagaaaccttacacatgtaatgaatgtggcaaggtttttagtagaaaagcacaccttgcatgtcatcatagacttcatactgtctaaggtttctaatcaacaatcaaaccttgcacaacatcagagagtttatactggagagaaaccttacaagtgtaatgagtggggcaaagccttaagtgggaagtcgtcacttttttatcatcaagcaatccatggtgtagggaaactttgcaaatgtaatgattgtcacaaagtcttcagtaatgctacaaccattgcaaatcactggagaatccataatgaagacagatcttacaagtgtaataaatgtggtaaaattttcagacatcgatcatatcttgcagtttatcagcgaactcatactggagagaaaccttacaaatatcatgactgtggcaaggtcttcagtcaagcttcatcctatgcaaaacataggagaattcatacaggagagaaacctcacaagtgtgatgattgtggcaaagtcttgacttcacgttcacacctcattagacatcagagaatccatactggacagaaatcttacaaatgtcttaagtgtggcaaggtcttcagtctgtgggcactccatgcagaacatcagaaaattcatttttgagataactgttccaaatacagtgactatagaagatcataaagctttaattgacattagagccaaataggcattgacttgagattgagttgacttaaccttgagtttaagaattaatttacattaaagtgtttatgttaagaagattgggccaggtggggtggctcatgcctgtaatcccagcactttgggagcccaaggctgatagatcacagccacacctggctatgagagtgtgtaggtggccgttggggtgggacctgattagaaggggcagggccttgaacagaatctgggcggggcaagaatgaggaggctgcctggaggccgggccagagggtgatcgtcatcttgagggcaaggtctggaagtggtgttttgaagggcagggtctcgagggggcgggtcctggctttctcctcagctggaccccaggtgtcgtctgctgtcatcctcttgccctgcaggactagattctccgggtactaattggtggatagtttctgatgtgccgtgatattacccctaatatcacagggatgcctcctgtccattttagagacttgctctgtcgcccaggctggagggcagtggcgcgatctcggctcattgcaagctccgcctcccgggttcatgccattctcctgcctcagcctcccgagtagctgggactacaggcgcccgccaccatgcctggctaattttttgtattttcagtagagacggggtttcactgtgttagccaggatggtctcgatctcctgacctcgtgatccgcccgcctcggcctcccaaagtgctgggattacaggcgcgagccaccgcgcccggcccctaagttaatatttcaaacaatcgaaggtaaaacaacatattgtgttgggccacctgtactgaacgctgaatcgtttttcctcttaagttgaaaatggttttaatgcaaagcgccttttttgagcaggtagagtcacgcatccggcaggcggggcgagctcccctctgtctggggcagggtgggggagaggggcagggacctcggtaaaggggtggagtggcgcgctggttgccgcgggcactggcaattagaagggattattaaactaagcaaggtcctgggttgtttgagtggataatggaaactgaaaggtgacgtgcaaaactgcctattactcccaggagtggaggataatttcatatttcatggaaataaactcagggcccggagcggtggctcacacctgtaatcccagcactttgagaggccaaggagggaggatcgcttaagcccaggaattcgaaatcagcctaggcaacatagtaagacctcatctctactaaaaataaaaaaaaacagccaggtgtgttagtccacacctgtggtcccagctgcttggggtgctgaggtgggaggatcacttgagccagaaagttggaggctgcagtgagctctgatcttgccaccacactccagcctgggtgaaaaagctagaccctgtctcaaacaagcaaataaatgagaggtataagtcctcctttaaaagtaaaggaagagatttttctttccttttgtctcttagaacattcaattagaaaatttgtaaattcattttctctgtcttctgaggtttttttttttagacagagtttttctcttgttacccaggcttgagtgcaagccacgatctcgcctcaccacaacctccgtctcccgagttcaagcgattctcctgcctcagcttcccgagtagctgggattacaggtatgaaccactatgcccggctaactttgttttttttttttagaaattaaaccttttttcagcttaatgacccaggggtgtatttttgaaggacttgggagctctctttgaaaggcaaacaacaagggaaacagtacctttatctcagtaggaaattaaataattcaaacatcaaataacttcaatttaaggctatggactttgagataattctgagccttgagaggaatgtggtcaggcaacctgagtccagtggaatgcaggtgcaacttctaagagttttcctgtaagtaattaagaagactaagtagccccagagataagacctcctcggatcattgtcccttcttatgtagtgataaagtaaccttccttgaagtgtatctatccgtaatcaatcaagttgctgcagcctatgcactggcccagaataaaaaacgtggtgattctgctaaagcttctctgtctttccctgtgtgtgaaatcttaacgtctctacttgggaacgctgatcccattcatttagagttgatgtttccacgtggctatttccaagctttgccttcaaataaattctgtacttaatcatatattctaaattttattatttactgctgacatcagtttctgtcggattgtaggagcctcaccagagagggcccctgtcgccatgttgtaaaactcacacttgccaaaagttgtgggttagggtttctccccctccctcaggatgacgctagttagctgacacagatggtcacctccattaccaagtagagtcaggatgaactatgtgtgactgttcaactatgtgtcctcttccctgaggactgattagtgtttatcttgaaaacatgtccttaatgggttgtatagaacactgaagcatctgatttcaaactcttagctcttttcctctatttcccatcacattctggtctaaggcttatttattaataaaatgatttttatttctttattatcgtggagatgatttttcatttgggggaagatcattttgttttcaaatatattgtctcaacatttaaatagtgaagtaaagagtatttcttgtgccaggcatggtggctcacgcctgtaatcacagcactctgggaggccaaggcaggcagatcacttcaagtcaggagtttgagaccagcctggccaacatggtgaaaccccatctctaccaattatacaaaaattagccggacatggtggcgcgcttgtaatgccagctattccggagggtgaggcaggagaatcacttcaacacagggtgtacaggctgcactgagccgagaccttgccactgcactccagcctggacgacagagaaatactctgtcttaaaaaaaaaaaaaggaaattaagaaagtaatagatctcctccacaaatgtgctgggacaactaacttgatattcacatggaaaagaataatgttggatccctacatcacacaatcaaaattttattttaaaaagttagagaacgaggaagggagccctgcgggagggggtgttactttgtcgcccaggctggtctggaaccccaggctcagcaaccctcccgctgctgcttcctgagtagctgggacctcaggctccctccccagtgcccgcatctctgctgtgtttaagcagcaggtggtgacttcgctcctccctggcctgagcactccgtcccgcatcccaggcggtggccctagggaagtctctgaagctgagcacagggtggactctgcccccaccgccgacccgccctccccgaccccgagtgaatggagaatagaaagggagaggatttctgttctgtcctgtgggccctcagtatgaaatcgtagttctgcccaggcaggactttgcatttcacattctagtttgcatccccgttccagacaattccagggcttttgactcatgcctcagccttcccggccagtctcccttccaaaacccgaaaaacggaggcgctgggctcaagactgactctgtcccgccccggccccgccctctgccggttctaaagggcaaagtctctccgcctcgcgccccgcttccgcctgcccaggccccgcccacctcctcctggaccccgcccaggcctggcttctgtcctgcgcgagcagatcagcgcgaacctggaagcggagagcgtggagtgaaggtcccacggcagcgcgtgagtttctctctgttttatattaagtctgtgcgtcccaggtccccggcgcgtctgtacctgggacgtggggtccccacagacctggaaattctcgcccgtcttcacccagagcaaattgagacttccctttgagagtccggggttcacttccttttgggtttaaaatcgccttgaagctggtgcggtctctggtcttgctgctatagggcaatgtatacactttgtattgggtagttttcctgctcaaaacctttttctaactcctcccgccccgcgctttttaaagtccttacaggtgaggtggattcccgccctgggcgcctcccaccctcgccttcgacggcccctcgagtgcagcgccgtgcccccagtcccgcggaggctgcgtcctctgcctggtcctgagatccttcagaccccaccattgtcttaaggcgccgtcgtcccccacctcccttctcgtgccgggccctgctgctccccaggtctcctctccgccgtcaccgcttcccctgagcccgcgttgggaaggtgtccggggcctgtcctgtgacacggggtgtccttgcctgcccagctccagcccctggaaaatgagctcccccgggatgcagacgtcttactccaaaccctcctgtaattgtatgggccaaaggaatcaggtgagagagagcagtagaaaacctgagataagaaaagagcaggaggagaaaagcaactggagaaatgtagagaaaagctagatgtacagagagatgaaggacagcaaggaagagagggggcagcaaagaggaaggctcatcagagtgagggagaggaggaggggtttggagccagggcagacagagcagagtggtgctggtggcaaggacagagggagaagcacagcagggaggactactgtgggtctagagtgccataaagtgtggacagggatgtataacagggaagagagaatgtaacagggagagcagaggaggcgcagagatgggagaagaggcggaatctatggaggttgaggacaatccaaagattgtgggagaaggagcaataagaggttaaataagtagcgaggatggagcagaaaaggtggaagagaagtaatagagggaagaaggggataaacagcagaagaggagaggggcaaaaatgaggcacggaagcccagggaaaaagacaagaaaacaagagctagagagagaaggggagaatgagagatatgtacagatttagcgagggaagcacagtaatgaagacagaggggctgggcgcagtagctcacgtctctaatcccagcactataggagactgagacaaggggattgcttgagtacaggagttcgagcaacataatgagacctccccatctctgaccaaaaaaaaaaaaaaaaaaaaaaattaaccgggcgtgatggtgcacagctgtaatcctagctactctggaggctgacgtaggaggataacttgagcccaggaggcccaggctgcagtgagccgagatcatgccactgcactccagcctggtcaacagagtgagacactgtctcaaaagaaaaaaaggagcgggggactttgggtaaagatgagtaggttagttcactggatatcattagtcgttgacttctttgtatataatctgataacttaaaacttgtttaaattatacagatgaggttgagaatttttaaactcctgtctatgagacatgtacctgtaaatcttagcatcagaggttagcttccacctgaaatccctattcagccaaacagcagtgacttattcagttgtgagtcactctcttgccttttcccagagttgggtaggaagtggagcagtgaagtgggaaaaaaaaaattggtgttattacataatacttttaatttaattaattaatatttgggatgggctctggctctgtagcccaggctcacgactgtaatcccagcactttgggtgaggctagtggatcacttcaggtcaggagtttgagaccagcctggccaacatgatgaaactccgtctctactaaaaatacaaaaattagccgagcatggtggtactcacctgaaatcccagatactagaaaggctgaggaaaaagaatcgcttgagcccaggagcagaaggttgcagtgagccaagagcctgccactgcactccagcccaggtgacagtgcgagactctgtttcaaaaagcaaaacaaaaccatctgggtgactttaaagataatccagttctggccaggcacgatggctcacgcctgtcatcccagcactttgggaggctgaggcaggcggatcaccagaggtcgggagttccagaacagccttaccaacatggagaaaccttgtttctactaaaaacacaaaattagccaggggtggtggggcatgactgtagtcccaactactcgagaggctgaggtgagagaagtcacttgaacccgggaggcggaggttgtggtgagttgagatcgcgccattgcactccaccttgggcaacaagagtgaaattccgtctaaaaaaaacaaaaagatatccatttccctgtttgctactcctgtgtttttgattcagtagttcttggacgagagctcgttgtccacatattacatatgactattctccctaagcattcagaaggaggcagtcagtggaggaaattgtgaaatattttgctagatccatctgtaatgttttctttcttactaaaacatagggctgcggctctagaaaagctccagcacgtcatcttcctttttttttttttttttttttttttttttttttaataagcaggagtctttctgacctgttatctccatgttggagtgagggaaggagccctggactgtggagaatgaagtgaaaataacaaaaaaaatacagatgggtaggaatgtattatgggtgtaaacacaaataggagctcagatgggcagagtggaagctccaccctcaaatctctctgcaagtgggagaattcggcgggaaaagaaaagtttaaatcctgagatctctgagtggacatctttctttgccccctcttatgtctctgttatttattttattttattttatttatttatttatttattttgagacagcgtctcactctgttgcatagactggagtgcagtggcacaatagctcactacgacctccaccacctgggttcaagtgattctcctgcctcagcctcccaagtagctggaactacaggcatgcatcaccaccatactaggctaatttctgcatttttggtagagacggggttgtgccatgttggccaggctggtctcgaactcctgacctcaggtgtttttcctgcctcggcctcccaaagtgctgaaattacaagtgtgagtcaccacgccaggcccctctgctctttagatgtgtagtagtttgatttttttgtcctctagtgatgctgcagctcagagacaaaggcagaatctttatcctgatgggcaacaccgtgtcatctggcttctgtgacctcattggtttcttgactctggaacagggagggctgtgtcaaaggggtctccttcccctgtggtctctcattctgtacttgactccttctgacgctccattctctgtccctatagataagatctgaggcctccatacacctaccccttgacctaccaggttccatcccatttcctgtacttggaacacctaatcaagagatcggaaaacctgggctgctcctcctttgcaaccggggcccgggatactgcacagagccctctctgcttgttcaaatagttggcttgcctatttgaagtaggaaaaaaaggccatgcgcggtggctcatgcctgtaatcccatcattttgagaggctgaggagggcggatcacttcaggtcgggagtttgagaccagcctggccaacatggtgaaactccgtctctactaaaaataccaaaagtagccgggtgtggtggtgggtgcctgtaatcccagctactcgggagactgaggcagaagaatctctcgaacccgggaggtggactctgcagtgagctgagattccgacactgcactttagcctgggcaacaaagaaagactccaccccccgccaaaaaaaagaaatacaaaaaaaaaaaaagtgtttttcctactctctcatgccactgagcacagaatgcctcagttctgatcaccaaaatttgtggatttctccccaaccacatcttggagtgcaatggtgtgatcttggctcaccacaaactctgtttcctgggttgagatgattctcctgcctcagcctcctgagtatctggcaaaagagcaagacctcatctcaaaataaaataaaatatgtgagaacaaaattactcaaagtacaaaaggctaatcagagactcaaagaaaacaaccatttgtctcttatttacctatgtcctggaatccaccccccaccccgctttgggttgttccacctttcccgacttaaccaacgtacatctgacacttactgatacgtcatgactccctaaaatgtaagctctacctagaccatattgggcacatgacattaggacctcttgagcctgtgtcgtgggcatgcagttaaccttggcaagataaactttctaaactgattgagatttgtctcagatacttcgttcacaaactatttttaaagtcccaggtaatttattttagcagctaaaagaaaaatcttggctggcacgttggctcatgcctgtaatcccagcaccttgggaggccaaggcggttggatcacaaggtcaggagttcaagatcatcctggccaacatggtgaaaccttgtctctactacaaatacaaaaattagtgggcatcttggcatgtgcctgtaatccccgctacctcagaggctgaggctggagaatcgcttgatccagggagtcatgggttgcagtgagccgagattgtgccacttcactctagcctggtgacagagaagactgtccaaaaaaaaaaaaaaaaaaaaaaaaaaaaaaaaaaaaagctggtttcaggggtttctggttacaacaggaagtttcagcagccatacttcagagaatcacgttcttgaagcaatgtttgtatcctgagttcatttttcatctgtcctcttgactttggtttagttgtgaggcagcctcattttctggggtaatacctgatgttcgttgtctcatggccacggaaatcgaggacacggacacccaagagtggcgttaagagtggaagttcaataggcgaaagaaagtcaatagctctctgctacagagagaggtcctggaaaaatggtttgcagattcgtggcaaaacgtaggggttttatagatgagctggtggggaggtagtgtcttatctacataggaccagatgtaacatttgcatacggcatgaatttctggcagccccctccccaatcttttattatgcaggttctttgcctgagctgtgccatgttacccatttctttcttactgtacacgtgctaacaaaaaaggaaagacggagcttccatggtggacatgcctagccccaaggtagccccttttctattggcacagctgctgacttcccccatgcaagcttccagcttgcttacgtatgtttgcagatcgatttttcgggctgctctttgttagaacaaaacgatattttgggcagctttttgttagaagggaagctctgcagaggagtttttgcccttactgtctgcctaaatagtttatttttacctcctgtataagttggatgtggcaagagtgacccaattgataagatgaacttttatcacggcagaattttaaattcactttacgtgcattctgcaagtaactagaaaagatactttttatttgcaaattataaggtgttttgtttgtttgtttgttgttatttgagacaatctcactgtgtcacccaggctggagtgcagtggtgcgatctcgactcactgcaactcccgcctcccaggttcaagcaattttcctgcttcaacctcctgagtagctgggattacaggtgtgggccaccatgcccggctaatttttgtatttttagtagaaacggcatttcgctatgttggccaggctggtcttgaactcctgtcctcaagtgatctgcctgcctcggcctcccaacgtgctgggattacaggcatgagccaccacacctggccaattataaggtattttattttttattatttttattattattttttgagacggagtctcagtctgtcacccaggctgcagtgcagtagcacgatcttgcctcactgcatcctccttctcctgggttccagcaattctcctgcctctgcctcccgagtagctgggattacagccataagccattactcccagctaagttttttttgtctttttagtagagatgggatttcaccatattggccagtctagtctttaactcctgacctggtgatctgcgtgccttggcctcccaaaatgctaggattataggcttgagccaccgcacccggccctgtaagttattttataccttttctttgtttttctttctgtcaggtgtggtaagaaaacctgtaacatagatagccttcagaatatatttggatttactgtggagtcctaattagggaaaaggagtctggctagtgggaacagggggaaagcaaagagataaggcaaataagctatttaaaaaactaaacattgagctaccatatcatccagcaagcccagtgctgggtatatatacccagcactaggctaaatacaagaaataaaagaaatcagtatattgtgtgtatacttatagacaatgaagtaatgttcagccgtcaaaaagtatggcatcctgtcatttccaacaacatggatgcaactggagagagatatatatatatataaatatatataatatataaaaaatatataatatatataaatatatattatatataaaaaatatatataatatatattatataaaatatatatgtaatatatattatatataaaatatataatacataaaatatatatgtaatatatattatatataaaatatataatacataaaatatatattatatatgtaatatatataatctatatataatatagattatatatatatattttttttttgctgagacagattctcgctgtgtcacccaggctagagtgcagcagtgcgatctctgctcactgcaacctccgcctcctgggttcaagcgattctcctgcctcagcctcccaagtagctgagactacaatggtgcacaaccacgcccagctaaattttgtgttatttttattcgtattccccatatttacttttatttcacagtactttttatatccttactctgtatgtatttttgctctatgtaaagtaaaatgcatgccatgtgttcatttggggcgtaagagaaaggcatttagaagaatacaagtcccacttatcaatagggatgcaggtttgtcagagtgtgaaactgcactgctatgggattttcatcatgttcatataagtatcctaaggccgactgcagagaggataactgaagtggaaggtgtgattgtatgttctcaaattgtatgatgtttaattccatcataaaaaaaattgtaggctgggcgtggtggctcatgcctgtaatcccagcactttgggaggctgaggcaggcggatcacgagctcaggagatcgagaccaacctggctaacacagtgaaaccccgtctctataaaaatacaaaaaaattagccgggcatggtgtggcgggcacctgtagtcccagctacttgggaggctgaggcaggagaatggtgtgaacccgggaggcggagcttgcagtgagccagagcttgcagtgagctgagatcctgccactgcactccagcctgggcaacaaagcgagactccttctaagaaaaaaaaaaattgtagctccttcagccttagcaacctgatggcacattgtttgtgtttagacatgaaggatcctatagaggtgagataaagctatgcaggtagatggaacataattaactcagttataaaaaaattaaatgttgttaacacatgacatctgtgatacattctaaataaaacaatagaaactgtagcctagccatcacagtaaaaccccatctctaccaaaaaatacaaaaattagctgggcatagtggtggtacacctgtagtcccatatactagggaggctgaagcaggagaactggttgaacccaggaagcggaggttgcagtgagccatgatcgctccattgcactccagcctgggtgacagagtgagacactgtctcaaaaaacaaacaatagagaatgtaatgctgacagtttaaaaggattcctaatcaaggacatgctattgtgggtttttttttttaaaataaactctcctttttggaccaggcacagtggctcacacctgtaatcccagcacttttgggaggccaagcagaaggatcacttgagctcaggagttcaaaaccagcctgggacacatagtgaaaccccgtctctacaaatagaaaaaaaaaagctaaaaatccctcttctctgtggtaactgctcttttcaagttcaagattaagagaaatttttcctcaatcttgctaaatgacagctactgccattcaatggagatgtggctaacatgtcccctgcattacctctactgtatatgtaatcacttcctattaacgtattaatctcctccaataaaaactgcagcctcttaaggtcttggactgctctatttcatgattggttagtagagcatttctttcctataatccacactggccctctctgtgaagaatgccctgtatgcaataatctgactgatatcacagctttacattattctcagccccctacaaatcttaattcagccattttttttcctttttttttttttttgagacagagtctcactcttgtccaggctggagtgaagtggcacaatctaggctcactgcaacctctgcctcacgggttcaagtgattctcctgcctcagcctctcttgtagctgggattacaagcatgcatcaccatgcccggcgcatttttgtattgttatagtagagatgcggtttcactttgttgcccaagctggtctcgaactcctgatctaaggtaatatacctgcctcagcctcccaaagtgttggaattacaggcgtgagccaccatgcctggcccattctggtttttgaggagcatcacagaagcacatacataggcaacaatctccgtctggttctgtttccttttctttgtgtttttctttctttttttttttttttttttgagatggagtctcgcctgtcacccaggctggagtgcagtggcatgatctcagctcactgcaagctctgcctcccagattcaagcaattctcctgcctcagtctcccgagtagctgggattacaggtgccagccacaatatctggccaatttttatatttttagtaaagatggggtttcaccatgctggccaggctggtctcgaactcctgacctcaagtgatccacccatctccgcctcccaaagtgctgggattagccaatattcagccagtaattaatttcaaaagatagtgtccctgtttcacaggaacatggagagaaatgatttcacctaatgaagtaggccattgtttcctattcctgcctatagatcatgaaatgactaagaaagacatcataaaaacatttcaaatgtcagcttgaaagtcaacattggtaaagaagtctttctccttcaataatataatacattatttcatgacctgaaagtaactggccatttccaaatgtccttgagtctttgatatatatgtcatgacttttaacatattttgaattgtaattattctgcagaatgtaatataaaagatttatggtagagaattagacttcctattggctgggcacggtggctcacgccagtaatcccagcactctgggaggctgaggcgggcggatcacgaggtcaggagatcaagaccatcctggctaacacggtgaaaccccgtctctactaaaaatacataaaattagccggacatggtggcgggcacctgtaatcgcagctactcgggaggctgaggcaggagaatggcatgaacccgggaggtagagcttgcagtgagccgagatctcgccactgcaccccagtctgggcaacagagtgagactccatctcaaaaacaataaccaaaaaaagagaattagacttcctgtgagctctcagatggattatagtttgtgaataatttaccatatcattacatttgtaatggattgttccactataatttttatttttattttttgagatggagtctcactctgttgcccaggctgaagtgcagtggcaggaccttggctcactgcaacctccgcctcccaggttcaagtgattctcctgcctcagcctcccaagtagctgggattacaggcacgcactaccacacctgggtaatttttgtatttttagtagagagggggtttcatcatgttggccaggccagtctcaaactcctgacctcatggtctgcctgcctcagcctcccaatgtgctgggattacaggcgtgagccaccatgcccgggctccactatgatttttttttttttttttgagacagaatctcgctctgtcgaccaggctggagtgcagtggtgtgatctcggctcactgcaacctctgcctgccgggttcaagtgactctcctgcctcggtctcccaagcagtgtggactacaggcgtgtgccaccacccccagctaatttttgaatttttagtagagacgggatttcaccatgttggttggctaggatggtctcaatctcttgacttcatgatccacctgcctcggtctcccaaagttctgggattacaggcatgagtcactgggtccggccctccactatgaatttttaatgaaccctgaggatgcatcttagattagtaacctttccagattcactacatttgcctggtttttattgagtggatctctcacgacaaaatcatgaatattacactgaaaggcttattacattatctttgtgtagttactctccagtataaaccctgtgatgttccggttttgatgcctgggtaaaagcttaagcatgcacgttacatttgtatggtttcatcaaaaaagtttttgatgcctagtgagactttggcctgcggaaaatctctatcacatataattattataaatgctctttagtatggattctctgatgttgatgaatgtttgaagtcataatggtttcccactctcagtgtttttgtttctctcaagcatgaatttttgcaatattgtacaatgtgagaattgtgccagaagaccttgccacattcattacatttgttaggtttctcaccagcaagaattctttgaagaatcctggtctcagattttaccttaagaccttgccacattcagtacattagtaaagtttctgtcctctatggtctagctaacggttattaagccttgaacaaaaactaaaggctctgctacattcattatacttgcaaagtttttctccagtataaattattgtatgtcttacaaggctttaatgctaactgaacactctgccacattaattacatgtgttagatttctttccggcatgaaatctctgatgacgtacaagatatgaattgtcgcggaagagtttgccacattcattacatttgaaatgtttctctccagtgtggatcgcatgatgattagtgaggcttgaacgcatactaaaagctttgccacattcattacatttgaaaggtttctctccagtgtgaattttccgatgatgtgctagggatgagtttagaccgaagaccttcccacattcattacatttataagctttttctccagtatgaattctccaatgatatgcaaggtatgaattttgactgaagactttgccacattcatcacatttgtaaggtttctctccagtatggattctgtgatgttgtacaagatgtgaattttgactgaatgctttgtcacattcatcacacttataaggtttctcaccggcatgaattatcagatgttgggcaaggtatgaattgcgactgaagaccttgccacattcattacatttgtaaggtttctctccagtgtggattctccagtgatttactagggatgacttgtgactgaagaccttgccacactcattacatttgtaaggtttctctccagtatgaattctccagtgatttactagggatgacttgtgactgaagaccttgccacactcattacatttgtaaggtttctctccagtgtggattctctgatgttgtgcaaggtgtgaaatatgatggaagacctttccacatacattacatctgtaaggtttctctccagtatgaatgatcagatgttgtacaaggtaggaattgcgactgaacaccttgccacatttgttacattcgtaaggtttttctccagtatgaattgtccgatgttgtgcaaggtgtgaaatttgatggaagacctttccacattcattacatttataaggtttctctccggtatgaattctttgatgttgtgcaaggtgtgaaatttgattaaagaccttgccacattcattacatttatatggtttctctccagtatgaatcctgcgatgctgtgcaaggtgtgacatattatggaagaccttgccacattcattacatttatatggcttctctccagtatgaattctttgatgacttgcaaggtttgattttttattgaagatcttgccacatatatcacatttaaattgcgtctctttagtatggattatttgatgtatagtaaaatgtaagccttgatgaaaggccttgccacgctcactacatttgtagtgttctgtcccaatatttgctttctctttttgtgtgaataatgaatccacaaaattacattcatatgtatgagaaatgtgggttttgacagtagaagaaatacgttggggtggggaaactaaggaactactgttgacagatttttccatgtgatcatatttatatattttcccttcagcttgaaatagctgcagttctggtagatgtgactgcgggtttaatccaagctgatttttaacaggctgcttttgtgcatcatcctttctcccatgcatgtctcttctaccaatgagactttccttataggtcacacgcactcgcttataatgtcttcaatcatgtttccacagacactgagagtcatgtacatttttctgggtttctctgaagcaaaaatcttgtatgtcgtggctttcatgtctttccaacattactgtctggaatatttctcctgtattactctccttttttggtggtaattccttgatctcacatttagaaaaaatacctacaagatataaggatcccacagtttccaattaattacagatagtcaataaatatctcctattgaaatgtgtaatagtacactaagagtaatacttatgttaaagaaagttataaaactcccattcatgatttttaactttttggaaaacaaaaggaacagatattttctaatagagaaagggtgactgcacataattcaaactaattgcagaaaagcctagtataaagaaacctatggccaaaccacttacattgcaaaaatttaggttagctccccaaaattgagattttttccaacatgaagcctgagcatactgcaatagaaggaaaacatatggctgtctaatagttgaaagaattttgtacttaagaaatttattgactaaggtcagagaaaacattctttggagcaaactgaaaaataaaaaggtatacaacacaacgaaggcacccatggcctaaatgtttgcactgaccaaaagatcctattccccaatattatgttattgcaagtggggacattgggcaacaattaggccatgaggaggaagggaggaagctctcatgaacaggattagtgcctgtataagaaaaaccactagagtacttgcttcctctcactctgacatatgatagacacagcaagaagcaggttggggccaggtgcggtggctcatgcctttaatctcagcaactggggaggccacggtgagtgaatcatctgaggtcaggagttccagaccagcctgaccaacatgattaaaccctgtctctactaaaaatacaaaaattagcaaaactccatctcaaaaaaaaagcagactggggtaaaatagaaagaaggcaccacccaggaagtgtttttatgcattttgatcttggacttcactgcttacaggtttatgagaaattatttcctgaagtttaggatgtaagcatctcagtctacagtatttcttatggcaggctgatgtggttaagacatgaaaagttagatggatgaaaaggtccatctaatgaacatgacagagactgataaatcttttttttctttttgagacgaagtctcactcttgtgccccaggctggagtgcaatggcacgacctcggctcgctgcaacctccgccacacgagttcaagcgattctcctgcctcagcctcctgagtagctgggattacaggcgactgccaccatgcccagctaacttttgtattttaatagagacggggcttcaccaagttggccaggctggtctcgaactcctgaccttaggtgatccacccaccttgggctcccaaagtgctgggatttcaggtgtgagccactgcgcccagccaaatcttttcttaaataaagtaacttttccatctttacaaaaacttcaatattcctagccgtctaccaacaccaacttgccaaaagaaacttggagtaaattattgcttttcaaatagagtaggtccaccaatttacactgcaagtaagtgaggtcaatgggatttgatcttgggctgcagatccagacatttcttaaaagtggatgcagtattgacccagcaatcccattactgggtatatacccaaaggattataaatcattttactataaaggcacatgcacatgtatgtttcttgcagcaatatttacaatagcaaagacttagaaccaacccaaatgcccatcaaggatatactggataaagaaaatgtggcacatatactgcatggaatactatgcagccataaaaaagaacgaggttggcaggacacagtggctcacacctgtaatcccagcactttgggaggctgaggtgggcggatcacctgaggtcgggagttggagaccagcctgatcaacatggtgaaaccccgtctctactaaaaatacaaaattagccgggcatggtggcgcatacctgtaattccagcaacttctgaggctgaggcgggagaatcgcttgaacccgggaggcggaggtggtggtgagccgagattgtgccactgcactccagcctgggcaacaagagcaaaaactccatctcggaaaaagaaaaaaaagaatgagatcatgtcctttgtagggacatggatggagctggaagccatcgttctcagcaaactaacacaggaacagaaaaccaaacaccgcatgttctcactcataagtgggagttgaacgattagaacacatggtcacagggagggaagcaacatagagcagggcctatcagggggtagggggcaaggggagggagaacattgggaaagatacctaatgcatgcagggcttaaaacctagatgatgggttgatgggtgcagcaaaccaccacggcacacatatacccacacgacaaacctgcacaacacgacacgacatggcaaatagatgcatagaaaggaatcatttcaagggagctacaagaacggggttgtgttgctgaccatgtcacttggtaatccttcctagacagcggtatgtccaccatcgtacagagcagacatcggtttaggctgtgttctgagaaagccgtcctacagataagcaagtgtctttccttacatggtgagagtagcatggggactgagtactgtggatattgaggtggtcagaaatacaaagattaatatgttaagaagtgacagtaggccgggagcagtggctcatgcctgtaatcccaacactttgggaggcccaggcaggtggatcacctgaagtcaggagttcaaacacagcctggccaacatggtgaaaccctgtctctactaaaaatacaaaaattagctgggcatggtggcatgtgactgcagtcccagctacttgggaggctgaggcaggagaattgcttgaaccccagaggtggaggttacagtgaaccgagatcgtgtcactgcactccagcctgggcaacagagtgagattgtctcaaaaaaaaaaaaaaaaaaaaaaaaaaaattcccacccatcttattttcacttcatgctacacagtccagggctctttgccttgctccaacaggttagaaagagactcctgcttataaaaagtaggaaacatgacatgttggaagttttctagatccccagccctatgtttctgtaggaaagaagacattacagatggacttaggaaaatatctcacaaattcctccactgactgcctccttctgaatctttaaagagcactgtaatatgtggacactgagctctcttcccagaactactgaatcaaaagcacaggagtagcaaatagggaactggatatctttaaagtctgccatgaggttttgttttgtttttgttttttgagacagaatcttgctctgttacccgggctggagtgcagtcatgcattctcggctcactgcaaccattgcctcccaggttcaggtgataatcttaccttagcctttctagtacctgggattacagacatgtgccatcacgcctggataatttttgtgtttttttttttttgagatggagcctggctgtctcccaggctagagtgcagtggcacgatctcagctcactgcaagctccgtcccctgggttcatgccattctcctgcctcagcctcccaagtagctgggactacaggtgcccaccaccacacccggctaatttttttttgtatttttagtagagacagggtttcactgtgttcaccaggatggtctcgatctcctgaccttgtgatccgccctcatcagcctcccagagtgctgggattacaggcgtgagccaccgcgcctggccaatttttgtatttttagtagagatgacgtttcgccatgttggtgaggctagtatcgaactcctgacctgaagtgatccacaagctttggcctcccaaagtgctgggattacaggcatgagtcaccacgccttgccagccataaggttttaagccttctttacttctggaacccccactgagctatcatgaagaacgcagaacatctaaaaaaggggacagtgaaagtccagatgctacatcatgaagcttttcatttcaaaatcaatacggcttccattttagtcaagcaaggatgcaactcccaagagaaacaagagaaaatgcaaagatacacaagggaacatccccacttctggagggaagttatcctcacccagggagaccaggttcctataattctccaacatcacatctctgtatagagtcctctgagcagggtccaggcatttccactcctcctgagagaattctatggccacatccctgaatgtcaatagaccctgaaatgaaaacacattttaaccaaatggttatgggaggagttcttatctttacagaaaatgaggagagcggtgacaacaaggatttaattgtagtgaatgttctgacaaatctgagtaagggatttttcaccacatgatgtcttcccagtggtgtttgattatactttttgaagaggtcataataccctcttgttataaatttattatgtttgtgaagaatacaagaaacactcaaataaatagatgcctggttcccattatagaaatgttagaaacttttggccaggtgctgtggctcacgcctgtaatcccaacactttgggaggctgaggcaggtggatcacaaggtcaggaattcgagactagcctggacaatatggtgaaactctgtctgtactaaaaatacaaaaattagctggatgtggtggtagatgcctgtagtctcagctactcaggaggctgaggcaggagaattgcttgaagccgggaggtagaggttgcagtgagccaagatcatgccactgcactccaacctgggcaacagagtgagactccatctccaaaaaaaaaaaaaaatgttagaaacttttattgacacaccaagtgacactcagtatctagatgagatagagcatgagtgatgccttcaaagatgacaacgtccacagtgaaatagccgggctcaatggcacatgcctgtaatcccagctacatgggaggctgaggccggagacttgcttgatcctgggaggcagaggttgcagtaatccaagatcacaccactgcactccagcctgttcaacagaaactccatctcaaagaaagaaaaaaaaatttagctgggcatggtggcaggcatctgtggttccaactacttgggaggccgaggtgggaggatgtctttaccatgagggtacaggttgcagtgagctatgattgcaccactgagcttcagcctgggcaacaaagcgaggccccatctcaaaatacaagaaaacaaaattactcaaagtacaaaaatacattttttatatatatgtccacaaaataataaaatttacgcagactcacaaaaaactagagttgaatgcaaagggttgtcattttccccagattttcaaaatacaaaagattttcaaaatatatacgtatgtgtgtatgtgtatatgtatatatgtgtgtgtatatctgtgtgtgtatatctctgtgtgtgtgtgtgtgtgtgtgtatatatagtttcctttaactgaagaggaatctcatcttggtggaaaaggaactttggcagttgagggcaggggagaatctgttcagttctaagaaaacaggagattacccatcctagaagcaatcactccttcaacagccttccctggaggaatcctcagatatctgtagtaatgcaggtgagcacagaggcagtgactatggcactccttatacagagaaaagtcacaaaggacccatatgttattcagccaatttccaatgcaggcatcaaagaggaaggtagccatatttactaatatgagaacatgttaattttcacaaccagcaggatgaaatatcagagtaaaatatttactaaacacaaagaagaaaacaacagacactaggcgtcaggcctctgagcccaagtctgcacgtatacatccagatggtctgaggcaagcgaaaagcacaaaagaagtgaaacagccagcttctgtcttaactgattgaccaaccttatgactttccattatgacttgtttctgccctgccccaactgaccaatggatcaacctcatgacattcttcttctggacaatgagtcctatgacctccccaccatgcactttgtgaccccctcctctgctgacaatagataaccacctttaattgtaactttccactgcttatcccagtcctataaaactgccactcccctatctccctttgctgactccttttttggactcagcctgcctgcacccaggtaaaataaacagccttgttgctcacacaaaacctgtttggtggtctcttcacagggacatacgtgacatttggtgagatgtgggacaggaggactccttcaggagactgatcccctgtcctgatctccatgaggagctccagctacgacctcaggtcctcagaccaaccagcccaaggaacgtctcaccaatttcaaattgggtaagtggtctttttactgtcttctccaactttgtcactatccctcatcatctttctcctttcaatttcagcaccacctttcaatctctcccttcccttaatttcagttcctttccttttctggtagagacagaggagacatgttttatccatgaacccaaaactccagcgctggtcacggacttgggaagacagtcttcccttggtgtttaatcactgcagggatgcctgtctgattattcacccacatttcagacttgttcaatcaccacagggacacctgccttgatcctccaccttggtggcaagtaccatttcctctttgtggcaagtaccaccccactctctctgtgtctctacccctcttttctctaaacttacgtttttactatgggcaaccatccaccctccattcctcctacttcccccttagcctgtgttcttaaaaacttgaaacctcttcaactctcacctgatctaaaacctaagcatcttattttctcctgcaacactgtttggccccaatacaaacttgataatggctctaaatggccagataatggcacttttgatttctccatcctacaagacctaaataatttttgtcataagatgggtaaatggtctgaggtgccttatgtccaggcattttttcacttcacttcctccctagcttctggtcccaatgtgactagtcccaaatgcttctttccctcctgcctgtcccttcagtcccaacaccaactgctgctgagtcttctgaatcctccttttctgaagacccctcttacctctctccccctccccaggccactcctcagaaggctgaatcaagtcccaattcttcctcagcctccactcccccaccctgtaaccctgctgtcacctcccctccccacacccagttcggcttacaatttcgttctgcagcaaatactccccaacctgcccaacaatttcctctttgagaagtgcctggagctgagggcatcggcagagtgcatgtaccattttctctatcagacctttcccaaattaatcaacacttaggccccttctcgtgagacaccactaaatatatacaggaattccagtatttaatccaatactacaacttaacctggagtgacttaaatgtcatcctaccttctaccctttccccagatgagtgggatagagtttataccctagcccagtcccacactgacacctgcaggcctcatgagccaaaccttcaacaaggcatctgggtagttccccaagaagatccctaatgggaataccagacaggctccccaggtatagctaggcaagattatgatttcctgcctagttgaagtgcttaaaaaggcagcttacaaagctgttaattatgacaaacttaaacgacccaaggtaaagatgaaaacccagcccagttcatggttcatctggcagcaattctgagacactttacagccctagaccctgaagggtcagaaggctgtctcattctcaatatgcattttatcaaccagtcagctcctgacattagaaaaaagcttcaaaaattggaatccagtcctcaaaccccacaacaggaattaatcaacctcaccttcaaagtgtgcaataatagagaggaggcagccaaatggcaatgcatttctgagttacaattacttgcctctgctgtgagacaaaactcagctgcagctccagcacacaagaacttcaaaacgcctaagctgcagtggtcaggcattcctacaggacctcctctctcaggatcttgcttcaagtgccagaaatctggccactgggccaaggaatgcctgcagccagggattcctcccaagccacgtcccatctgtgcagggacccatggaaatcagactgtccagctcacccagaagccactcctagagcccctaaagctctggcccatggctctttgactccttcccagatctgctcggcttagcagctgaagactgtcactgcccaattgcctcggaagccctctggaccatcagggatgctgagctttgggtaactcttacagtggggcgtaagtccatcccctgtttaattgatacaggggctaaccactccacattaccttcttttcaagggcctgtttcccttgcctccataactgttgtgggtattgatggccaggctcctggaccccttaaaacttcccaatttggtgccaacttgaacaatattcttttatgcactcctttttagttatccccacctgcccagttcccttattaggctgagacattttaaccaaattacctgcttccctgactattcctggactacagccacatctcattgccgcccttcttcccaacccaaagcctccttcacgtcttcctcttgtatccccccaccttaacccacaggtatgggacacctctgctccctccctggcaactgatcacacacccatacctaatcacccttaccctgctcaacaccagtatcccatcccacaacaggctttaaggggattaaagcctgttatcactcgcctgctacagcatgagcttctaaagtctaaaaactccttatgattcccccattttaagtgtccaaaagctggacgagtcttacaggttggttcaggatctgtgccttttaaaccaaattgttttgcctatccaccctgtggtgcccaacctgtacactcttttgttctcaatactgccctccacaactcactattccattcttgatcttaaacatgcttttttcactattcccctgcacccctcatcccagcccctctttgcttttacctggactgacactgacactcatcagtcccagcagcttacctgggctgtactgccgcaaggcttccgggatagccctcattacttcagccaagctctttctcatgatttactttcttttcactcctctgcttcctaccttattcaatacattgatgaccttctactctgtagtccctactttgagtctttgcaaaaggatatcctcctactccttcaacatttattctccaaaggatatcaggtatcccccaccaaagctcaaatttcttccccatccattacctaccttggcataattcttcatgaaaacatgcatgctatccctgccaactgtgtccagctgatctctcaaaccccaaccccttctataaaacaacaactcctttccttcctgggcatggttggatactttcacctttggacacctggctttgctgtcctaacaaaaccattgtatcaactcacaaagggaaacctagctgaccgcacagatcctaaatcctttccccactcgtctttccgttccttgaagacagctctggagactgctcccacactagctctccctgactcatcccaacccttttcactacacacagccgaagtgcagggttgtgcagtcggaattcttacacaaggaccaggactgcaccctgtagcctttttgtccaaacaacttgaccttcctattatacgctggccatgatgtctccgtgcagctaccaccaccctaatacttttagaggccctcaaagtcacaaactatgctcaactcactctccacatttctcataacttcccaaatctattttcttcctcacacctgatgcatatactttttgctccctggctccttcagctatactcactctttgttgagtctcccacaattaccattgttcctggcccagacatcaatccagcctgccacattattccagataccacacctgacccccatgactgtatctctctgatccccctgacattcactccatttccccctcctttcgtgttcctcatcctgatcacatttggtttattgatggcagttccaccaggcctaatcgccactcaccagcaaaggcaggctatgctatagtatcttccacatctatcattgaggctaccactctgccccactcccacagcctctcagcaagcagaactcattgcctaaactcaggccctcactcttgcaaagggactacacatcaatatttatactgactcaaaatataccttccatatcttgcaccaccatgctgttatatgggctgaaagaggtttcccccctatgcaagtgtcctccatcattaatgcctccttaataaaaactcttctcaaggccgcattctccttatgtcaagtctactccccccatatttggactccccacaacacaagctactatttctgtggtcactccattatgtatctctcagcaaagacccactggaattcccctggggaacttttcaccttctcaatgctccttcactcttcatctccaaagcccaactacatatatcacagaaacaattggggccttccagctccgtattacagacaagacatctatcaatactggcaaacttaaaaacattattgcttaggaaaacatttaccctgtatttcactccatccttggctaccttccccttgctcttcagactctcctcccaggccctcttcttatttacttatatccagccccataaataacagtgaaagtttgcttgtagacactcaatgctttctcatacaccatgaatattgaacctccccctctacacagttaccccatcagtccccattacaacctctgatggctgccgccctagctggatccctgagtctgggtaaaagacacctcttttagcacttcttctcatcttttcactttgcatttccaattttgccttgcaaaaggcctcttcttctgtggctcctccgcttacatgtgtctgcctgctaatcggacagggacatgtacactcatttttctcattcccaaaattcaatttgcaaatgggactgaacaacttcctatcccactcatgataccaaacagacaaaaaagagttattcctctaatccctctacttatagggttaggactttctgcttccactattgcccttggagctggaatagcaggcatttcaacttctgtcacgaccttccatagcctttcaaatgacatttctactagcattacagatatatcacaaactttatcagtccttcaggccaagtcaactcttagccccagttgtcctccaaaattgctgaggcctggacttactcactgctgaaaaaggaggactctgtatatttttaaatgaagagtattgtttttacgtaaatcagtctggcctggtatatgacaacataaactcaaggatagagcccagaaatttgccaaccaggcaaatcattacacaggacccatctggacactttctaactgagtgtcttggctactccctattcttagtcccctggtacctgtttttctccttctcttattcaggccctgtgtcttccatttagtttctcaattcatacaaaaccacattcagaccatcaccaatcattctatatgacaaatgctacttttaacaaccccacagtaccatcccccgcaccaagatctccccacagcctaaatccctattccttgtaactcattataaaattttccttaaggtgtccacgcagctcctaatctcactcgaagcaaccctgagaaacatcatccattatctctccataccacccccaaaaatttttgccaccccaacacttcactattttgttttatttttcttattaatataagaagacaggaatgtcaggcctctgagcccaagactgcaggtatacatccagatggcctgaggcaaccgaaaagtacaaaagaagtgaaacagccagcccctgtcttaactgattgaccaaccttatgactttccattatgacttgttcctgccctgccccaactgatcgatcgaccttgagaaattcttctggacaatgagtcttatgatctccccacaatgcaccttgtgacgctctcctctgctgacaatagataaccacctttaactgtaactatccactgcttaccccaggcctataaaactgccccaccccatctccttttgctgacttctttttcagacccagtctgcctgcacccaggtgaaataaacagccttgttgctcacacaaagcctatttggtggtctcttcacacagacgagcatgacactgcagtctagttgagggtggagggtgggaggaaggagaggcataaaaaagaaaaactattgggggccaggtgttgtggttcatgcctgtaattccagcactttgggaggccgaggtgggtggatcacctgaggtcaggaattcaagaccagcctggccaatgtggtgaaaccctctctctactaaaaatacaaaaattagccaggcatgatggcaggcacctgtaatcccagctactgaggcaggagaatcccttgaacctgggaggcagaaattgcaatgagctgagatcataccagtactctggcctgagcaaaagagcaaaactcagtctcaactaaataaataaataaatattgggtactgggcttaatgtcaaggtgatgaactactctgtacaacaaaccccgatgacacgagtttacctgtgtaacaaaccttcacatgtagccccaaacctaaagtaaaaaaatgaatattgtcaggcctctgagcccaagctaagccatcatatcccgtgacctgcacgtacacatccagatggccagttccttccttaactgatgacattccaccacaaaagaagtgaaaatggcctgttcctgccttaactgatgacactgtcttttgaaattccttctcctggctcatcctggctcaaaagctcccccactgagtacgttgtgacacccactcctgcccaccagagaacaacccccctttttcctttacctacccaaatcctataaaatggcccaacccctatctatctccctttactctctttttggactcagcccacctgcacccaggtgaaataaagttttattgctcacacaaagcctgtttggtggtctcttcacacggacacgcatgaaatttggtgccatgactcagattgggggacctcccttgggagatcaatcgctgtcctcctgctctttgctccatgaggaagatccacctacgacctcaggtcctcagactgaccagcccaagaaacatctcaccaatttcaaatccggtaagtggcctctttttactctcttctccaacctccctcactatccctcaacctctgtctcctttcaatcttggcaccacacttcaatctctcctttctcttaatttcaattcctttcattttctggtagagacaaaggagacacgttttatccgtggacccaaaactcgggcgccggtcacggagtagggaaggcagccttcccttggtgtttaatcattgcagggacgcctctctgattattcacccaggtttcagaggtgtcagaccacacagggacgcctgccttggtccttcacccttagcagcaagttccgcttttctagggaaggtgtaagtaccccaacaccttctctctgtgtctctaccccttcttcgcctttctggggggcaagaaaccccaaccccttctccttcacccttagcagcaagtcccacttttctaggggaggagcaagtaccccaaccccttatatctctgcaccccaatcccttatttccatgccccaacctcatatatctctgtgccccaacctcttatatctctgtgccccaatcccttatttccatgccctgacctcatatctctgtgccccaaccgctttcccacttttctggaggtaagaacccccaaaccccttccctccgtgtctctactctcttttctctgggcttgcctccttcactataggcaatattccaccctccattcctccttctccctttcctgtgttcttaagaacttaaaacctcttcaactctcacctgacctaaaatctaagcatcttattttcttctgcaatgccgctggaccccaatacaaactcgacagtagttccaaatagccagaaaacagcactttcaatttttccaccctgcaagatctaaataattcttgtcataaaataagcaaacggtctgaggtgcctgacatccaggcattcttttacacatcggtccctgtgcccagtctctgtgcccagtgcaactcatcccaaatcttccttctttccctcctgcctgttccctcagtcccaaccccaagcatcgctgagtctttctaatcttccttttctacaggcccatctgaactcttcccctcctccccaggctgctccttgccaggccgagctaggtcccaattcttcctcagcctccgctcctccaccctgtaatctttttatcacctcacctgctcacacccggtccggcttacagttttgttccgtgactagccctcccccacctgcccagcaatttactcttaaaaaggtggctggagctaaaggcatagtcaaggttaatgctcctttttctttattccaaatcagataacgtttaggctctttttcatcaaatataaaaatccagcccagttcatgactcgtttggcagcaaccctgagacactttacagccctagaccctaaaaggtcaaaaggccgtcttattctcaaaatacattttattacccaatctgctcccgacattaaataaaactccaaaaattaaattccggccctcaaaccccacaacaggatttaattaacctcaccttcaaggtgtacaataatagaaaaaagttgcaattccttgcctccactgtgagacaaaccccagccacatctccagcacacaagaacttccaaacgcctgaaccacagtggccaggcattcctccagaacctcctcccccaggagcttgctacaagtgccagaaatctggccactgggccaaggaatgcccgcagcccaggattcctcctaagccgtgtcccatctgtgtgggaccccactgaaaatcggaccgttcaactcacttggcaaccactcccagagcccctggaacgctggcccatggctctctgactgactccttcccagatcttcttggcttagtggctgaagactgacactgcccgatcgcctcggaagcctacaggaccatcacagatgctctaagtaactctcacagtggaaagtcagtctgtccccttcttaatcaatacggaggctacccactccacattaccttcttttcaagggcctgtttctcttgcctccataactgttgtgggtattgacagccaggcttctaagcctcttaaaactcccccactctggtgccaacttggacaacactcttttatgcactcttttttagttatccccacctgcccagttcccttgttaggctgagatattttaaccaaattatctgcttccctgactattcctggactacagccgcatctcactgctgcccttctccccaacccaaagcttccttcgcatcctcctctcgtatccccccaccttaacccacaagtatgggacatctccactccttccctggcaactgctcacatgcccgttaccatcccattaaaacctaatcacccttaccccactcaacgccagtatcccatcccacagcacgctttaaaaatattaaagcctgttatcactcgcctgttacagcatggccttttaaagcctataaactctccttacaactcccccattttacctgtcctaaaaccagataagacttaataggttagttcaggatctgcaccttatcaaccaaattgttttgcctatccaccccatggtgccaaacccatatactctcctatcctcagtacctgcctctactacccattattctgttctggatctcacacatgctttctttactattcctttgcacccttcatcccagcctctcttcgctttcacttggactgaccctgacacccattaggctcagcaaattacctggggctgtactgccgcaaggcttcacagacagcccccattacttcagtcaagcccaaatttcttcctcatctgttacctatctcagcataattctcataaaaacacatgtgctctccctgctgatcgtgtccaattaatctcccaaacctcaatcccttacaaaacaacaactcctttccttcctaggcatagttagtgtggtcagaattcttacacaagagccagaacggcaccctgtagcctttctgtccaaacaacttgaccttactgttttaggctggccatgatgtctgcgtgcagcagctgctgccgccctaatacttttagaggccctcaaaatcacaaactatgctcaacttactctctacatttctcataacttccaaaatctattttcttcctcatacctgatgcatatactttctgctccctggctccttcagctgcactcactctttgttaagtcccacaattaccattgttcctggcccggacttcaatccggcctcccacattattctggataccacacctgaccctcatgactgtatctctctgatccatctgacattcacaccatttccccatatttccttctttcctgttcttcacctgatcacgcttgatttattgatggcggttccaccaggcctaatcgccacacaccagcaaaggcaggctatgctatagtacaagccactagcccgcctcttagaacctctcatttcctttccatcgtggaaatctatcctcaaggaaataacttctcagtgttccatctgctattctactactcctcagggattattcaggcccccctcccttccctacacatcaagctcgaggatttgcccccacccaggactggcaaattagctttactcaacgtgccctgagtcaggaactaaaatatctcttagtctaggtagatactttcactggataggtagaggcctttcctacagggtctgagaaggccactgcagtcatttcttcccttctgtcagacataattcctcagtttggccttcccacctctatacagtctgacagcagaccagactttattagtcaaatcagccaagcagtttttcaggcttagtattcagtgaacccttatggtcctccatcttcaagaaaagtagaacggactaaaagtcttttaaaaacacacctcaccaagctcagccaccaacttaaaaaggactggacaatacttttaccactttcgcttctcagaattcaggcctgtcctcagaatgctacaaggtacagcccatttgagctcctttttattaggccccagtctcattccagacaccagaccaacttggactgtgccccaaaaaacttgtcatccctactatcttctgtctagtcatgctcctattcacccttgtcaactactcataaatgccctgctcttctttacactgccagtttacactgtttctccaagccagcacagctgatatctcctagtgctgtccacaaaccgccactcttaactcttaaagtaaataaataatctttactggcaaggctatgctgaacctccttaggcactctctagtattagatgtcgtagttcctcccaattcttagtcctttaatacctgtttttctccttctcttattccgtttagtttttctattcatacaaaactgtatccaggccatcaccaataattctaaatgataaatgtttcttccaacagccccacaatatcaccccttaccacaaaatcttccttcagcttagtctctcccactctaggttcccacgccacccctaatcccgctcgaagcagcccagagaaacatcgtccattctctctccataccacccccaaaaattttcaccgtcccaacactttaccactatttcgttttatttttcttattaatataagaagacaggaatatcaggcctctgagcccaagctaagccatcatatcccctgtgacctgcacatacacatccagatggcctgttcctgccttaactgatgacatcgtcttgtgaaattccttctcctggctcatcctggctcaaaagctcccctactgggcaccttgtggcccccacccctgcccaccagagaacaacccccctttttcctttacctacccaaatcctataaaacggccccaccccatctcccttcgctgactctcttttcagactcagcccacctgcacccaggtgaaataaacagctttattgctcacacaaagcctgtttggtagtctcttcacacggacgtgcatgaaaaatataatttcttttaatttactgccgttttttcctaaagtctcataatgatgcaaaaatacacgtgtacgagacttgctctgataacctggcacagaactgacagtagcggctccccagtgaggctggaaggagggtggaggatgtgacagggaaaggagacgctttatggccaagggcctaagatgcagctttgcttagagttttaccacaaaacaaatatattcattggtcaggtgtggtggctcatgcctgtaattccagcacttcgggaggcccaaggcaggcggatcacctgaggtcgggagtttgagaccagcctggccaacatggagaaacctcatttcttctaaaaatacaaaattagccgggcatggtgacgcatgcctggagtaccagctactcaggaggctgaggaaggcgaatcacttgaacccaaaaggtggaggttgcggtgagcaaagatcacgccattgcactccagactgggcaacaagagtgaaactctctcaaaataaataaataaataacaaatatatacatcatgtgatgttcaaatataaaaatatatattcattattaattggtggggctgggcaccgtggctcgcgcctgtaatcacagcactataggaggctgaggcagaaggatcacctgaggtcaggacttcgagaccagcctggccaacgtgatgaaaccctgtgtctactaaaaatacaaaaagattagccgggtgtggtggcatgtacctgtaatctcagctactcaggaggctgaggtaggagaatcacttgaactcagaaggcagaggttgcagtaagccaagatcaggccgttgcactccagcctgggtgacagagcaagactccatctcaaagcaacaacaataataataataataataataggtggaatgagaatatggctccatcctctaggatacaaaagtgcttctcccatagttgagaaaaatagtaactatttttaccaaaaacacctgtttcagaagcctcttaacaccacaatctccacgagcttaatgtgctaagaatggtttaaagaatctcctgctattattcaggttgatttcctattcttaaaataatgatggaataaaacaccttgtatcatgcatgtctgtgtatgaactttccattctaattagtaagatttttggagtcagaaacaaagtaactcactaaattacctaaaaatatagtataaaatcagggagaaaagatttccccttatttgtctccttttctagaatttaccacatacttcgtggacattaatacgtgacttccattggcagctgctctaatcctggtccacagagagttgacagagcatccagatgtggcccctgaacaatccctgctgcccaacagcactgacaccacgggaccctcaccccgtctccatccatgtctgggtgtgggcccttaccaggaccatgcccagtgcagcctcttcccaagttcatgtgattgggtcacaagagatggaatctaagtgagatgagagggactgagggaaggcatgggtgagtgtgagcaaacctgtcaggcaggacacttcttgagacccagagaagattcccaactccaaggcccagggtttctgaaaggaaagagacagaacaatccaccgagaatatcatctcacctgaggaagaaccattcctgacgcctttgctttcctcttccccttccgggtttcttcctcatgtaccaagagtccttagaagtcaatcctgaatgttaaaaatatgttgtttattgctcagaatcaatacaccccattcctgtaacataacaacacatacaaaggagacctcaccctgaggaaatatggtcccctctgctgcccactgcaccagagacgataaactcctacaggaaaactcccgcacccttctggagaagcccacaccacacccttctggaggagtccacacacgctgcagcagtggggagctgggctggaatgagctcctcttcagggcgcagacccagccctgaccaaaccccatgcagaaactgggtgcagtggctcatgcctgtcatcccagcactctgggaggctgaggcaggtggatcgcttaatctcaggggtttgagatcagcctgggcaacatggtgaaaccccatctttgccaaaaatacaaaaacatagccaggcatgaaggtacacgtctgtgtgtctatgttcccagctacttaggaagctgaggagacagaatcgcttaagctcaggaattagagaccagcctgccaacatgttgaaaccctctactagaaatacaaaaattgggctggccacagtggctcatgcctgtaatactagcactctgaaaggccaaggtgggcagattgtttgacgtcaggagttcgagagtagcctgggctacatggtgaaactccatctctactaaaaatacaaaaagtagctgggcttggtgggcgtctgtaatcccagctagttgggaggctgaagcaagagaatcgcatgaatctgggaagctgagattgtggtgagccgaaatcacgccactgcactccagcctgggaaacaacagggaaattccaactcaaaaaaaaaaaaaaactatgtagaccacgtgcggtggctctttcctgtaatctcagtactctgggcggccaaggcaggaggatactttgagcccaggattttgagactagcctgggaaacacagtgaaacctcgtttctacaaaaaaaaaaaaaagaaagaaaaagaaaactagccgggcttcttggtggctcatcactgtggtcccagctacttaggaagctgacgtaggaggattacttgagcccaggaggaccaggctgcagttaaagatcatgccactgcattccagcctaggcaattggccagaccctgtctcttaatgttagttaattaattaagttaaaaattatgtgttaacagaaagggatttttttctcacttcactgccccactccctaccccactctgggaaaagggaacagagtgactcacaagtgaataagtcactccactgtagctgaatagggattccaagtggaagctaacctctgaggccaacattcatagaatgtacatgtcttatagataggattcttaaaattctcaatctcatctgtataatttaagcagttttaagttactagattatatacaaagaagtcaaatgtcacaactaatcgtatccaatgaactcacccactcatctaaacccaaagtcctccgcccctttttttcttttgagacagggtcttgctctgttgaccaggctggagtgcagtgacatgatctcggctcactgcagcctggacctcctgggttcaagtgatccttctgcctcggccttcagagtagctgggattacaggtgcacactatcatgcccggttgtttttttttttttttggtagagatgggggtctcactatgttgcccaagctagactcgaactcctgtactcaagcaatcttcttgcctcagtctcctaaagtgctgggattacaggcgtaagccactgcgcccagcccatctttcttcattactgtgcttccctccctaattgtgtacatatctctcattctccccttctctctctagctcttgttttcttttctttttacctggcattctgctcctcattttgtacccctctcctctcctgctgtttatccccttcttccctctattccttctcttccacctcttctgctccatcctcgcaacttacctaacttcttgctgttccttctccccaatcgttctatcgtcctcaatcttgatatatttccgcctcttctcccatctctgtgcatcctctgctctccctgttaaattccgtcttccctgttataccccctgtccccaatatgtggaaccacagatccccaggtgtcctccctgctgtggttctccctctgttctccttgccaccagcaccactctgctctgtctgccctggctccaaatccctcctcctctccctcactctgatgagattccctctttgctgcccctctccctaccttgctgtccttcatctctctgtacatctaggtttctctacgtttctccagttacttttctcctcctgctttctttttttttcttttcacttttgctgtctcttgacaaatccatcacccaccctctactttgccctctgttatgggtctttctcattcttttctctgtctcagcttttctactgctctgtctcccaatgcctttggccgacacaatcacaggagggtttggataagacgcctgcatcccggaggagctcgttttccgggggctggagctgggcaggcaagaacaccccgtgtcacaggacaggccccgggtacctccccaacgcgggttcaggggaagaggtgactgtggaggagagacctgtggagcagcagggcccgccacgaggagggaggtgggggggagacggcgccttaagacaaggttggggtctgcaggattccaggaccaggcaaagtacgcggcctccctgggactggggccctggcgctgcgctccagtggcctacgaaggcgagggtgggaggcgcccagggcgggaatccagctctcgggtgaggactttaaaaagcgaggggcgggaggagtcagaaaacagttttgagcaggaaaactacgcgacaggaagtgtatacatcgccctacagcagaaagaccggggacagcccagcctcagggcgactttaaacccaaaaggaagcgatatccggactctcatggggacgtctcaatttgtcctgggtgaaggaagaagggagagaatttccaggtctgtggggaccccacgtctcaggtacagcagcgccggggacctggtaagcgcagacttaatagaagagcgaaactcaccgccacggtgtaactttcactccacataatccgcttccgggtttgcgcgcatgtgcgcgcgcagtacagaagccaggtctgggcggggcccgcgaggtgggcggggcctggatgaggtaggggcggggtgggaagccgagagactttcccctttagaaccagcagtgggcggggccagggcgggacctgtgagtctctcagcatcgttcccagcgcagaggcatttttcgggttttggaggcgagaccggccaggaaggctgaggcatgattcaaaagccctggaattatctggaacggggatgcaaactagaatgtgaaatgcaaagccctgcctgggcggaaggtacaatttcatgctgatagcccacagaaccgaatagaaatcctctccctttctattctccattcacttgggagagagtccacgctgtgctcagctttagagactcaggccactgcctgagatgcaggatggagtgctcaggccaaggatgggtgaggtcaccacctgcggcttaaacacagctgggatatgggcgcgggagtgggagcctgaggtcccagctattcaggaagcagcggcgggaggatcgccgagcctgggagttcaggccagcctgggcgacaaagtaacaccccctcccgcagggctcccttcctcgtctctctctctcttttcttttttataataaaatttttgatgatgttacatagggatccaacattattcttttccacgtggatatccagttagttgtcccagcgtatttgtgtaagagatctatcagtttctttttttgtttcttgagatggagttttgctctagttgaccaggctggagtgcaatggcgcgatctctgtctcccaggttcaatcgattctcatgcctctatctcccaagtagctgggatcacagggatgtgccaccatgccctgctaattttgtatttttagtagagatgggatttctccatgttggtcaggttggtctcaaatttccgacctcaagtaatccgcccgcctcggcctcccaaagtgctgggattacaggtgtgagccaccgcgcccggcttattttcttttatatatttagttttttctatttttttttttttttttttttgaggcagagttttcttttttggccaggctggaatgcggtggcgagatctgggctcactgcagcctctgcctcctgggttgaaccgattttcctgtctcagcctccggagtagttgacattacagacgcgcacaaccatgcccggctaatttttgtattttcgatacaaacgaggtttcactatattggctaggctggtctcgaacttctgacttcaagtgatctgactgcctcagcctctgaaagtgctgggattatagtcataagccacacttcctggcccaaaaaatattcatttctttactctttaaattttgagaaaatataatggaaaacaaaaaaaatcttccccccaatgagaaatcatcttcacgatgataatagtgaaagaaataaaaaccacattattaataagtaagccttaaaccagaatgtgatgggaaattgaggcaaacagctaagaggttgaaaagagacaaggaaacttcactgttctatacaacccattgagtacatgttttcaagataaacactaatcagtcctcagggaagaggacttgacaacactcttggtcacacatagttcatcctggctctatttggtaatggaggtgaccatctgtgtcagctaattagcttcatccagagggagggggaaaaccctaacccatgtctttttgacgagtgtgagttttacaacatagcgacgcgtgccctctctggtcaggcgcctacaatccgacagaaactgacgtcagcagtaaataataaaatttagaatgtaagattaagtactgagtttatgtgaacacaaagcttgaagaaagccacctggaaacaccaactccaaataaatgagatcggcgttccaaagtagagacgttaaggtttcacacacagggaaagacagagaatctttagcagaatcatgacagctttcattcaagcccagtgcataggttgcagcaacttgattggttatggattgatacaattcgaggaaggtcactttatcactccataagaagtaacaatgatcccatgaggtcttatctctggggctgcttagtcttcctaattattaacaggaaaactcttttttgtttttctttgagaggcagtattgctctgtcgcccagtggtgcaatctcagctcactgcaacctccacctcctgggttcaagcagttctactgactctaattgtcagtcctctctgcaaccagcgccccagtccacccctttactgaggtccctgccctccccactgcgctgccccagactgaggggggagttcgccccgactgcaggactctgcctgctcaaacaaggcgctttgcattaaaaccattttcaacttaagaggaaaaacgattcagtgttcagtacaggtgtcctactacaacatgttgttttatcttcgattgtctgaaacactaacttgaaatgggcaggaaacatccctgtgatattaggggtaatatcacggcacatcagaaccaatccaccaatcagaactcggaggatttagtccaggcgggcaagaggatgacagcaggcgacatctggggcccagctgaggagagagcccgaacccgacccttgccggcccccacccttcagaacaacaccccctccagaccccgcccccaagatgacgataaccctctggttctgccctttcccattgtatggcctggcccccaggcggcctcctccctcttgccccgccccagtcttgttccaggcaccgcccccacgctctagctctcctaggttcctgcttaagtttatacactcatggtccacagagtcctaagcagaaatatggaagacaccaagctctggtaatgtatctatctgacagactgagcgtctgcctcaagaacatagcaatagcaatactaagtgaaatattaggaagtttcacgtatgtatataattgatcatttattatttgcagctttaaattggctaaaattacatagcatgggtttttattttaatcaaatattagaaatatatcattcataaatggaatctaagcacacaaagttgaagagcatttccctatgttgaataaatatgaaggagttcagattttggaactgatttagtgctttccattacacttagttcttttcttttcttttactgttttttgagatggagtttctctcttgttgcccaggctggagtgcaatggcggcatctcgatcattttggaactgattttgtgctagtttttttcctattcttttttttctgtgttcatgagcttgtgaaccaaaagtatctaacaggtctcaatcaatttagaaatctcctttgccaaggttaaaaatgcacctgtgacacagcctcaggcggtcccgaccacaggtgcccaaggttttcaggctgcagtttggttttacatattttacagagacatgagacatcaatcaatacatataagatgtacattaattcggtctggaaaggtggaaaaactggaattggggggcttccgggtcacaggtagataataaattatcacattctttgagtgactcatcagcctttcactgaatacacaatttatatatgagagggagtagaggaatagtcacttatgccttaatctggctcattgactctgaatttttacataaatagggcaggggaagcagtcagataggcatttgactcaggtgtacagagggacgggttctgtcccacacctgtgcagataagctatcagtttacattgccagggtaaaattcaacagaactattttagggtgaagagcttgaggcttccagtttgtgaggggagtattgtagctttttttttttttttttttttttttttttgagacagttttgctcttgcccaagctggagtgcagtggcccaatctcggctcactgcaaccttcgcctcttgggttcaagcgattctcctgcctcagcctcttgagtagctgggattataggcaggcaccaccacgcctggctaattttgtatttttagtaaagaccgggtatctccatgtcggtcaggctggtctcgaactcccgacctcaggtgatcaactgcacccagcctctaactttttaaaaatccttgtagctatcttgtttaggaataaaacgggaggcaagtttgtctgacacagttcccagcttgacttttctctttggcttagtaatttttatttttctttcaccagcttgtgacagacataaggctttgacacactgatatttctttatatacattttccataacagtaaagtccaagggtctatcatgaactgggttagtggtgcatgtctgtgtgtctgtggtcccagctacttaggaagatgaggtgggaggattacttgagctcaggggttcaagaccaacctggtcaacatggtgaaaccctgtctctactaaaaatacaaaaattgggccgggcaccatggctcatgcctataatactagcactctggaaggctgagatgggcagattacttgaggtcaggagtgcaagaccagcctggccaacatggtgaaaccctgtctctactaaaaatacaaaaagtagccaggcttggtgggtatctgtaatcccagctactggggagactgaggtaggagaatcgctttaacctaggagtggaggttccagtgaacttgggtggtggaggttgtagtgagccgaaatcatgccactgcactccagctgggcgacagagtgagactcaaaaatacaataaactaaaaataaaaatacaaaaattagccagctttgtagcacaaacctgtaatcctagctacttgggaggctggggcacaaaaatcgcttgaacccaggagacagaggttgcagtgagtcaagaaacagagactgcactcacaggctggaccacagagtcagactctgtctcaaatagaaaaaaaaaaaaaaggcattaacgatgtgagtgatgcagagataaaaatcctgagcaactgtcgggcatggtggctcactcctgtaatcctagcacgttgggaggctgaggtgggtggatcaagaggtcaggagattgaggccatcctggtcaacacagtgaaaccccatctttactaaaaatacaaaaaattagctgggtgttgtggcatgcacctgtagtcccagctactcgggaggctgaggcaggagaattgcttgaacctgggaggtggaggttgtggtgaactgagattgtgccattgcactccagcctgggtgacaagagcaaaactctgtcttaaaaaagaaaaaaaaaaaattcctgagtaacgtgagagactgacaggcagaggaatcttcagatgggggtgggagggcatgggagacatctctgagcctagacctgaaggaggagaaagggacagtgctgtcatcatttaggtacatagtgtaagagcagggacaataacctgagacaggaagggttttgatgtttgggaaaagagaaaagcaactgtgactggggcagaggtagtcatgagatgagggcaagttcccaggaggaagctggacactggcaggggccctggacacagggctgtggagccacagtgaggagtggggcttttgtcctggggaacacgggaagctggtggagggttccctgccagggactgacatgacctgctttagatttcgctgtgatgtcctcacacagagaaaggccccgaagatggtctctgtgtctgagtctacaactctgtttcttccattcttctttttttttttttcatttttagggtactgcatcccatttaaaattctaattacaactggacagtcccctctcacagaaaaaaagccacatccagacacccactctattttgccaatcatttcaggggccagggtcactcaggttgagcttttccggtctagcccctcatctgcaagttgcagggaggctcactgaggctcagagtgaagacattttcaccgagttaccctgagaaggtctgagatgagtgaaaagatgtgtctgaattcttacatgtgggcctggaagggctaatgggaagggttggtctttatcacacccattattgaaaattaaagaagtgtcttccacatacctgggctaaaaaaacctcttttgcaaggttctgatgccattgactcccaacatttaattcttcattacaagaaaatcacagtaacatttataaaatgcagaagtgtgaacacacagttattgaccttgaaaacagtgaaagaaggtcagctgtagaactaagacatgagcaaatgttttcaatcaagaatacatgggtggccgggtgcgatggatcatgcctgatattgcagctttttgggaggtcgaggcaggtggaggtctcaggagtttgagaccagcctggccaacatggtgaaactccatttctactaaaaatacaaaaaattacctgggcatggtgacaggcacctgtagtcccagcaacttgggaggcagaggcaggagaatagcttgaacccgggaggaggaggttgtggtgagctgagatctcaccattgcactccagtctgggcaacaagagcaaaactccatcttaaaaaaaaaaaaaaaaaaaaagggggtgcttttggcacagcgttccgtgccaatccaacccatctttcaacatttgtccagaatggaccagagggcctgagggaaacatgcacttaatagcttacagctcaagattttaacaaatgacataaggaaagaaaactgaaaaatagactaactggttaaactacactttgatgttacggtaaaaggtcactgacatctttaccgggtacacactgaaacaatcaaacctctgcattaggtaccaaaggtttccaataaataataaagactagaaagcatgcacatctcgatttgaaccagacacaaacagaaactattttgaaattgttttaaaaaatataacaaattctggggtcaacaggaaaataactgaaaaacatacatgtacagaaaaaaatgatgtgagctgattataggatgcaacaaaggcatctttcagaagtgattatgtattaaaaaagaaattttgaaaactaagatttatcttggccaggcacagatgctcacgcctgtaatcccagcactctgggaggcaaagatgtgcagatcacctgaggtcaggagtttaaggtcagcctggccaacatggtgaaactccatctctactgaaaatacaaaaattagctgggcgtgctgacatatacctgtagtgccacctactcaggaggttgaggcaaaagaatcacttgaacccgggagacagaggttgcagtgagccaagatcatgccactgcactccagtgtgggtgactgagtgagattctgcccccccccaaaaaaaggataaagaaagaaaaatagaaaaatgaagaggaaacagaaaaaaaaataaagtaaatctattacacaagagaacaaaagcagttttcatgttcctgtttttgattttgtttattttttgtttgtttgcttgtttttgtgagatggagacttgctctgccacccaggctgcagggcagtggcatgatttcggctcactgcaacctctacttcccaggttcaagtgattctcgtgcctcagcatcttgagtagctgtgactacaggtgcatgccaccacgcccagctaatttttgtatttttagtagagaccaggttgcaccatgttggccaggctggtcttaaactcctgaccttaggtgacctgctcatctcaggttcccaaagtgctgggattacaggcatgagccaccatggtttgatattcctttaaaaaattatatgtaggccaggtgtgatggctaatccctgtaatgctggtactttgagggtccaaggcaggaagatcctttgcatcaaggaatttgagaccagcctgggaaacagtgaaatcccatttctccaaacaacaacaacaacaaaactagctgggattggtggctcatgcctgtggtcctagctactcgggaggccaaggtacgaggatcacttgacccccggaggtcaaggctacagttagaggagatcactccatggcactccatcctgggtgatagagccagatgctatctgaaaatattaattaattagttaattaaattaaaagtattattgaggcagaaattaaagaagaaagcaaattttcctctgctgagctcactcactccaaggatagtaacatgaaaggccatagaaaggtttgtggtgacccagtctaagaaactggatacatcccccccaactacacatggttaagaaaacaaattcctttactgtctctcctttcccagaatcattaattttgactatttttgcaaatgtctgcatgtctgtatttagcaaactctgtaagttcctgtttttcttttgatgcatctgcaaggtcacagctaagcaaggccacaagttataccaaggcagcagttatggtatagattacataacctgtcactgtatgatttactgtctttgtcctgcttctgtaagcttgcctatataagcccagctctgtctttgttctgggcttagctttctggatgtgagtccactgagctggtgtgcaccttaataaaactcctatgtttcacccattgatctctccagtcctctcatttcccacattatgtaataacagaaagtggtttttttcccacctcaccgccccacttcctacaccaccctgcaaaaagggaagagagtgagactctcaagtgaataaatcactatcctgtggctgaatagggattccaagtgaaaactaacctctgatgccaagatttatagaatgtacatgtcttatagataggcattttaaaattctcagtttcatctgtataatttaaataatttatttattatatacacagaagtgaagatgtcacaagtaatcatatccaatgaactcactcactcatctgccttggcctctagagtagctgtgagtacaggtgtgcaccatcatgccctgttaatttttgttttttggaagagatggggggtctcactatgttacccacactggtctcaaactcctggactcaggcaatccccttgcctcagtctcctaaagtgctgggattacaggcattagtcactgtgcctggcccctctgtcttcattactgtgcttccctccctaattctgtaaatatctctcattctccccttctctctctagctcttttttttctatttccctgggattctgcacctcattctgtacccctctcttctgctgctgtttattcccttcttacctctattccttctcttccacctcttctgcttcatccttggaacttatataacctcttgttcctccttctccccagtctttcaatcatcctcaatctccatatatttccacctcttctcccatctctgcacctcctcttttctccctgttaaattatctcttccctgttatacccctctgtacccactctctggcaccctagattcccagctgtgttccctgctgttgttcttcctctgttctccttgccaccagcaccactctgctctgtctgtcctggctgcaaatccctcctcctctccctcactctgatgagcctccctttttgctgcccctcttcctgccttgctgttcttcatctctctgtacatctagcttttctctacatttctccagttgcttttctcctcctgctttcttatcttttttttttttcacttttgtcacctcttggcaaatccctcacccctcctctactttaccatctgttatgagtctctctcattcttcttttctctgtctcaggttttctactgctctatgtctgtctcctgatccctttggcccacagaattgtggtaaaggttaaaaagaaaaagaaacaagttttcttctgcttagcagctcacttcaaggaaagttataagataacgctgtccaaaaagctaaggctaaagtaatgggctctagacactttttaaattccagaacaaagtgaaggaaaaaaaaaagagagagagagagaaagacaaattcttctactgttactcatttccctagtctcttaagcatgactatgttttacaaatgtctgtatttagccagttcttttttttgacacagctacaaggccaccagctatgtagaatccaacttctctaagactcatacaatataagccctatactgtaatcttgttcagtcccgctgctgttaaagttgcaggtgttgtgccttagatccaccacagtcagctgaaactggcagctcaagacaagtagacaagccagcaggacccagatcatccaactcatcctgagatgagatcaacctgctgctaaagaagactgcctgctctagtcactacggagtctgaccagtctatgcacagctgaagcttgagggaacaagccctgttctagtcacacaccagaagctgactagtctatgcatggctgaagcttgaaactccaggccctacctccacctccaccctctaaccaggcccagcttccaaagcagcctccaccctcttgcccagctccagcgacagttttcatgccctgccccctcaacgacctttcccttctcccgccgggtccccacccactgtccagaacccacccagacagggttgaaggcccacacacggttgttcttcagcactcgaggctgacacaggtgagtggtttttttgtcttcctgcttcaaacctggctttcgcagcaccccagcaccaattccagccacaccaggaatctgcatgctttgggatattgaaatcccccacgtgagtttgtgcagttgtcaggaagtcccaacttctccaagggaagcaggcaggctggtggctttgcagcttttgtatcgttttataaaatgatacaaaagatcttgtatgagccggtatgacacatctgacaactttacaggtaatattggagtattatatataaggcagttgatttgcaggactgctatgagagtttgggaacgtaaatacctatccagccaaaacgttcccattgtagaccagaaattcccgacccaagatcctcaatgggataacgacacagtccactaaaaattcatgaaagatataagggaaatgataattaaaggaattcaggagtcagtgccctgtgctcagaatcttccccgagcattttagataaaacagaaaaaagatgaaagccctaaaaactttctaaaaagactatgagaacaaatgagaaaatatgcacatttggatccagaagaccctagcaggcaagaaatgttaaagctacattttgttaccaatagctagccattggtagccatttagcaagccattgcaaaaaaagttacagaaactagaaaactggaaaaaacagtctatacgggaattcttagaataagctcaaaaagtatatgtaaggagggatgaagaaaaaccaaagcaaaaagaaaaattttctgacagaatgcaccagaggccaagcttaagcctccatttgccaggcctcacaaaagatatgagacaggggggccacagaactcaaagacaggtaaaaagggaaagcaaacccagtaccctaagactccaaaaactgaaaagggagagggacaagacaaatgttacaagtgtggaaaattaggtcatttcaaaagagaatgtcctgagtggagaaaggagaaaaaaaaatcccacttaaggaatttaaagaataaggaagtcaagggctctgtcttttctatctccagtcccactgagagcccgtggtaaatttaaaggtgggaccaaaacatgagcttgttacttttctttcttttttttttttgagacagagttttgttcttgttgcccaggatggagtgcaatggcgtgatcttggctcactgcaacctctacctcccaggttcacgtgattctcctgcctcagccttcccaagtagctagtattataggcatgtgccacaaagtctggctaattttgtatttttagtaaagatggggtttctccatgtgggtcaggctggtctcgaactctcgacctcaggtgatccgcccaccttggcctcccaaagtgctgggactacaggtgtgagccatggcacccagccgaacttattacttttctaatagactcaggagcttcccactcctctgtttgttttgtgccctctaatataaattgtttattagaagaacttcaagttttaggagtcaaaggggaaggatttaaagccaaagtctcagaaaaaacagaagtcagatttgaaacccgatcaaccaatgttaaatttttgctacttcctaaggctgggacaaacttgttaggaagtggcctaatggcaaagttaggtataggcttgcgtgtaagcccagaaggattcttcacttcattaaacctgtttactacagcagaagaaagctacatcaatgctaatgagtggtcaagggagggaaattgaaggaagctacaagttcctccaattcacataaagttaaaaactcccagggaaacagtgaaaagaaaccaatatccaattcccttagaaggtagattaggtttaaaacctctaattgagagccttatctgagatgggctacttgaactgtgcatgtctccctatactactccaatattacttgtaaagtagtcagattggtgatactgacttgtagaagatcttcaagccattaatcaaactgttcaaaccactcatcctgttgttcccaatccatatactattctcagcaaaattccatatgaccatcagtggtttacagaaatagacctgaaagatgccttctgggcatgtcctttagctgaagatagtcaggatatattcacttttgaatgggaagattctcactctgggtgaaaacaacaatactgctggacagtcttaccccaaggatttacagattctcctaacttgtttggccaaattcttgaggaggtgttagaaaagatgagcatcccaaagtgtatatctatgctccagtatgtggatgatatactagtgtcagggaaagctgtagaacaagtatctggcttttccatcagccttctcaaccatctctgtggagagggactatgtggtgtggtggcacacatctgaaatcccagctacttgggaggcttagaaaagagaattgcttgaatgcaggaggtggaggttgcagtgaaccaagattgtgccattgcacgccagcttgggcgacaagagaaagactctgtctcaaaaaaaaaaaaaaaaaaaagaaagaaagaaaagaaaagaaagaaagaaggaaagaaaaaacaggctgggcaaactggttcaggtctgttggcccagctggtctcaaactgctgacctcaagtgatctgcctgccttggcctcccaaagtgctgggattataggtgtgagcaactgcaccctgcccattcttcttgacgtaaacactttttatgtcaattaatgcttgaactcaatgttaagtcaactcaaactctagtcaatgcagaattgactctaatgtcaattaaagtttgtcattttctatagtcattgtatttgggacaattatctcaaaaatgaattttctactgttctgcaaggagtgacctcagactaaagacattgccacacctattccatttgtaagatttctgtccagtatagattccctgatgtctaatgcggtgtgaatgtaaagtaaagacattgccacactgggcgtggtggctcatgcctgtaataccagcactttgggaggccgaggcaggcggatcacaagatcaagagttgagagcaaccaggccaacatggtgaaaccctgtctctactaaaaacataaaaattagccaggcttggtggagcatgcttgtagtcccagctactcaggaggctaggaaggagaatcgtatgaacctgggaggtggaggttgccgtgagccgagatcacgccactgcaccccagcctggacaaaagagtaagacttcatctgaaaaaagaaaaaaaaatgactgccacaattatcacagttgtgaggttctctcccatatgaattctcctgtgttttgcataagatgaagcttgactgaagaccttgctgcaatcatgacatttgtaacgtttctttccagtatgagttcactgatgaactgcaagctatgaacaatgtctgaaatatctgccacatttactacacttgtaagatctctcttcattatggattctctaatgatttgcaatgcttgtagcattactgaggactttgtgagaatcattacatttgtaaagtttccctataccatggattgcttgatgatgaataagtgatgactgcccactaaaggctttgccacactcattgcacttataaggattttctccagtatgaagtctatgatggcatacaaaggatgacatatgactgaaggtcttgccacactcattgcacttgtaaggtttctctccactatgaagtctataatggtatacaaaggatgacatatgactgaaggtcttgccacactcattacacctgtaaggtttctctccagtatgaactctctgatgttgtgcaaggtttgactgttgattaaaaaccttgccacattcattacacttgtaaggtttctctccagtatgaattgccttatgaattagaagggatgaatttcgagcaaaggtcttgccacactcatgacagttgtaaggtttttctccggtatgaagtctacgatggcccacaagggatgacttctgactgaaggtcttgccacactcattacacttgtaaggtttctctccagtatgaagcctataatgacatgcaaggtgtgctttttgattaaaaaccttaccacattcattacatgtgtaaggtttctctccagtatgaactctctgatgttgtgcaaggtatgaatcacgctggaaaaccttgccacattcattacatgtgtaaggtttctcttcagtatgaactctgttatggcgtgaaaggcatgaattatgcctaaaagctttgtcacaaaccttacatttgtatggtttctctccagtatgaattcgcctatgtgtttcaagttgtgatctgcaactgtaaactttgtcacatccttcacatttgtaaggtttctctccagtatgacgtctacgatgccctacaagggatgacgtctgactgaaggtcttaccacactcattacacttgtaaggtttttctccagtatgaagtctatgatggcgtgtaagagatgacttgtgaccgaaggtcttggaacactcattacacttgtaaggtttttctccagtatgaactctatggtgccatgcaaggtattgcttttgatgaaacactttgccacatacatcacatttatattgtttctctcctgaatgggttacatgatgtcttcttaaatgtgagctataattaaaggctttgccacactcattacattggaaaggtttttctctcatgtgttcttcctggatttgtgtcaataatgaagaatggagaaagttcttcccatacctattagaaatatgggttttgagcctacaagaaattctttgggatgttgaaaccaaggaagcattgttgatagacttctccacttgattatcaattttcccttcagtctgaaattcgtgcagttcaggcagatgtgaataaaagcttgatccaagctgatctttaataggcttgtttccagcatgcctttgatcacgtcggtctgtactaccagtcaactttttgatttttgtcatgggtgcttcatggccatttcttttaatttcttgccactgaaactcaaagtcatgaatatctttcttgatttctgggaagcaaaaatctccaatgtgatgacttttatgtctttgcaatgtccctgtgtggatcacttctcctgtattaccgtgccctgttgatgagaactccgtcatggattttaaagagctatctaaaaaatataaagaccaataggtttccaattaagtacagatggtaaataatatttaatactgaaatgtgttaatattacacaaaaagcaatacttattttaaaattcccaaatatgatcttcaaagtttaagaacaccctgtctctattaaaaatacaaaaattagccaggcatggtggtggatgcctgtaatcccagctactcaggacgctgaggcaggagaatttcttgaacctaggaggcagagattgcagtgaacagagatcacatcattgcactccagcctgggcaacaagagcaaaattccatgtcaaacagagttcagtcaagagcctcatatatatgatgcagtaagcctgaatgatgtcctccctaagaggaatttctacagcagtgactgctgtttagagaacatgatcattagtttatgtgatgatcactgtcacagtaccagtgagagatgcttctgtgatgctccttaaaaaccagaacaaaaggccaagggtggtggctcaggtttgtaatcccaacacttggctagaggctgaggtgggcagattgcttgagacaaggagtttgagaccagcctggccaacatggtgattccccatctctaataaaaatacaaaaattagcaaggcatggtgacttgcatctgtaattccagttaggttgggaggctgaggtatgagaattgcttgaatgcaggaggcggaggttgcaatgagctgagatcacaacagtgcactccagcctgagcaagagagggagactctgtctcaaaaaacaaaacaaaacaaaagcagaatcacagctggaaacacttgtcagtcactgtcatgctttctagctcatctcctgggccaccctgacaattctgctcagggctaccaggggcatctctgcttagagcaggatgacgttcaattctattagtcaaagtgttcatgaatgttctgtttttatgtaaaaccactccataggatagtctctaagaagctgtctatgacagacaggaggatcatcactgcagaaaacaatgacatgtacatcaaaagcatgtatgcggcaaaatcacaaaagagaatacaaaaccaggaagagccaagatagacaagggcagattcctcacatcaggagggacattttcctcacccacagactccaggttcctgtagttctccaacatcacggccctgtataaagccctctgtgcagggttcaggcatttccactcctccaaagagaattctatagccacatccctgaaagtcaagcatccctaaaattaaacacacatttcaacaaaacattagggaggagtcattaccttcacacaaaatgagaaaagagaaaataagtattgatttgatccaagacggtgttctgacaaacccacattaaggtatttttgaacatttctttttgtgcagttgcattttattgtactttcccatgatagattttgaaatctcctagtcactgtggaagtctcagttttatggaaaatacaaaaaatatatgtctgggcacggtggctcacacctgaaatcccagcagtttgggaggctgaggtgggtgtatcaactgagctcaggagttcgagaccacccagggcaacatggtgaaaccaagtctctactgaaaacacaaaaacattaactgggtgtggttgtgcatgcctctagtcccagctatttgggaggctgaggtaggagtatagcttgagctccagaggcaaaggttgcggtgagctgagattgtgccactgcaattcagcttgggctgcagagtgagactccgtctctctctctctctctctatatatatatatagccaggcatgggggctcacacctataatcctgtcactttgggataccaaggtaggtggatcacttaaggtcaggagtttgagaccaacctgggctacattgtgaaaccccatatctactaaaaatagaaaaattagctgggcatggtgggggaatgtgcctgtaatcccagctatttgggaagccgaggcaggggaattgcttcaactctggaggcagaggttgtggtaagctgagatgacagcactgcactccagccagggcaacagagcaagtctttctcaaaataaaaatatatgtatgtatatattgcaaataatgtgttttctactaaaaccatgggcttggcttggcatggtggctcacacctataatccgaacacttatggaggctgaggcatgtggatcacaaagtcaagagattaagacaagctgggccaacatgctgaaacactgacactattaaaaacacaaaaattagcttggtatggtggtgtgcgcctgtagccccagctactcaggaggctgaggcagaagaatcacttgaactcgggaggctgaggttgcagtgagctgagatagtgccatttcattccagcctatcgacagagcgagactccgtctcaaaaaaaaaaaaaaaaaaaaaatcatgggcttctccattaatgctctcctggacacattgcaaatcacacctacacacacttcaattaacttcagtcgggacattataagcaaagacctagagaggacacatccacagctactcacgaggctgaggtgggaggattgcttgagcctggagagcagagtttgaagtgatccaagattgcaccactgcactccagcctgggggacacagcgagaccctatcacccccaccctcccaaaagttggaagctcattgaattaagagacaacttcaagaaatcataaatgcaatgcatgaagaaaatgagaaggtcagccaacatacagaaattacgaagaactacacagaaactctcgggctaaaaatacagtaactaaatggaaaaactcaatacatgggttcaaaatcagaatacattatgtaaattaaaaattagtgaaaaggggacaggtgaggtagctcatatcaggaatttgggaggctgaggtgggtagatcacttgaggtcagcagttcggagaccagcctcatcaatatggtgaaactttgtctctactaaaaatacaaagattagctgggtgtagtggtgggctccccactgcactccagcctgggtgacagagtgagactgtctcaaaaaataataaaataattttttaaaaaaggccaggcatgggccaggcacagtagctcatgcctgtaatcccagcactttgggatgccaaggcaggcggatcacctgaggtcaggaattcgcgaccagcctgaccaacatagagaaaccccgtctctactaaaaatacaaaattagccagatgtggtggtgcatgcttgtaatctcagttacttaggaggctgaggcaggagaatcgcttgaacctgggaggtggaggttgcagtgagccgagattgcatcattgcactccagcctgggcaacaagagaaaaactctgtctaaaaaaaaaaacaggcatggtggctcatgactgtaatcctagcactttgggaggccaaggcggggggatcacctgaggttggtagctcaagaccagcctgatcaacatagagaaactctgtctctactaaaaatacaaaattagccgggtatggtgatgcatgcctgtaatcccggctattcaaaaggctaaggcaggagaattgctttaaccatgaaagcggaggttgcaatgagccaagttcatgccattgcactccaccctcggcaaccagagtgaaacttcatctcaaaaaaaaaaaaaaaaagtagtgaataggaaaagaaacaacaacaaagaataaagaaaaatgaagggagtctaaacagactaacaggacaccatcaaggacaccatcctacacattatgaaagtcccaggccaggttctggctcatgcctgtaatttcagcactcacgcctgtaattccagcactttgggaagccagggtgtggggatcacctgaggtcagaagttcatgaccggcctggccaacatggtgaaatttcatctctaccaaaaatacaacaattagccaggtgtggtggtgcgcacctgtaacctcagttacttgggaagctgaggtgagagaatcgcttgaatccagaggcagaggctggagtaagccgagattgcaccactgcactccagcctgggtgacagtgttgggatttactcaagataggggcagaaatattaaagagaaatattagggaaagttatagggaatagtcacaaaccttttggaaggccgaaaggttatatagcttgtaataattgaacaggctgaaggcacccggttcttaccttagagcattaggtcatagggtaaatactagggacaatagaggcttccccagttaagcctgtttaccctacctccattaactaacctttgagccagatggccctctagcgggaggctgaccagggaaattgccccttaatggtatttacttcagatcacagtacctgagctttaatcattcatgaaactactctcttaaccatgctaattatcctcaagtgtgtttactcaaacttctgttgttaattctattctaaataaatgcctggagtgcgagctgctcagggccggctcttggtgtgcaggcgattgggcacccagcaggactggcaaagcagaatatctatgtgtcggtgtacgtttcattcatccgtctgggccagggtccgtgggcagacccccgcagctaatgccctcttgtgaggagcaatacctcagttgatgtcctgtgtgaggaaagtcagggatctgcagaaacagaccccccacagttcaagcctctcttgaggcaacctgtgaaggaagcgtgaggaccgccctcttgaggaaagctgcgatggaagcatgaggaacgcgacccccgaaaacaaaggcaaagaaggatttcgtggtcaagccagtgagtaatcagtaagtcattggtgcccactcgaggttaccaccttctgggggaagttgagtcaagctaaggtttcatcacgggacaatagttgtcagctcaacagaaacggtatataaaaatgttcagacagttgcttaaggctactggtcggaaacacagcagaactagcaaaacggaattatctgtgtgtcagtgtatgttttattcatatgtggtttaggtcagggttgacatgcagatcccacagctaatgctctcttgtgaggagcaatacctcaacagagcaagactccaactcaaaaaaaaaaaaaagagtaccagaagtcacagaagtgagtgagaagaagaaaggaacagaaaagcttgttggaaggcataatggcaaaaatttctaatttcaggatgcaaaagaaacaaattcaacaccttaagaatatccaacatggataaatctaagtaagagacctataacaaacaacatcataataaaactgtcaaaattcagagatagagaaagaatcctaacaacagccaaaagaagagctaactctcacccaagagggagctcctgtaatattatcaagatatttctcggctgggtgggcggtaactcacgcctgtaatcccacgaccttgggaggctgaggcgggcagatcatgaggtcaggagttcgagaccagtctggccaacatagtgaaacccatctctactaaaaatacaaaaaattagcggggtgtggtggtgtgcgactgtaatcccagctactcaggaggctgaggcaggagaattgcggtggtaagaccatggtggtaagaatcatggtggtaagaccacagtagtaagctttgcttaagtgagtgggaaattttgcatagtcttagtcagagagggcacctctgcagctgggggtagggatggaatcttcccacatctaaaagaggaaatggcaaatccaagaagaagcaatcagttttcaatgccccaacttgcaggaaacttccagatatctgcagtgaagtcaccatgctcacaggcagccagtgtgttattcttagcaacagtgaaaaactgtcaaggagattaagtgaagtcagggatttgagaccagcctggccaacatggtgaaatcctgtctctattaaaaatacaaaattagcccagagtggtggtggacacctataatcacagctgcttgggatgctgaggcatgagaatctcttgaccctgggaggtggaggttacagtgatcccagattgctccagtgaactccagcctgggcaataaagggagatagaatttaagatgacggggactgagaaaagccttgggtgagtgcgagcaaacttgtgacgcaggacgcttcagactcacggaagtctgcctactacaatacctggtatatcagaaaagagagagaagaatccactgaggaatatcactttacctgaggaagagccatccttgtctccttttctttggtcttcttggtggctttctcatgtaacatgagtctttggaaattaattctgtgtgagaaaaaaatatgatatttaattaattttttttgagatggagtccagctctgtcaccatgatggggttcagtgacatgatctcgtctcactgcaacctctgcctccccagttcaaggaattctcttgcctcagtgtaccaagtagctgggattcaagccatactccacgatgcacagctaatttttgtatttttagtagacatggggtttcatcatgttggccaggagagtctcaatctcctgaccttgagatctgcccacctcagcctcccaaagagctatgattacaggggtaaaccaccagacccagctgagatttaatgtttagaaaccacacattcctttcctgtgacaaaacatacacaggggagaccttacccggtataaagactgtcctctactgcccactgcaccagagatcatgcagagataagaaagccccacaggaagacctacaagggtaattttgacccattttcagatcttgctccctcctgaaaatgtccacacacacgctgaagcagggcacagaccttcaggacacagatctggccctaaccaaaccccatgcagagcacagccccctcacctccctgtggatcacagactgacctcagttctcaatatgggggaaactgccttgatgttcaatgctggacacagatgagaatcaccagcgccatcgtattattgagggtgtgtcccatcctatgataatagcaatctttgatagaatagcataaaagatgtatttgcaaaatgcctgagaaacctaatgtgaagtcagggttgagctccactcagagggtaccagctgagcacagccccaccttctggctctgctctccccttggggacttgttcccaccaggatccagtgaacagcgaaggagctaaaagaatcacacagaacaggtaacatggaccagaggtgggggtgaaggtggggctgcaatgtcaaatggggcctgtgggagatcacaaaggttactgtagataaagtgatgtcacaacaaagacttagggaagaaaggctgcttgtcacttgcagctgatgggacagagagtcctaggccgagggacagcccaggtgaaggccctgagacaggagcaacctcagccccagaaaaaggaaagaaacctgcgtggctggagcagagggagtgaggaggacacaggcaggagatgagatcagggaggtcctgggagcacagatccatagggatgaggtcttgaaatatttttctcccacacttcaaaagaattttggaaatgatgtattttctcacgcctttcatgtatacacacaacttttctttacgttataaattacaacatttacaaataatggaattcatttctcattttaaaaatacatgctgtcaagtttggctaagtccccagaagtaccctgtcaccctcatctgagacatgtaggactgcaagggaatgtgttcaggggtttaggaagtcacctatggaaatgtgcatttggagacgcctgtttaatatcccagcagagagctgaggagccaactgaacacaggattgcagagctcaggggagaggcctgtagggaacatggagtcgtgtaggtgggttaaagttgtgaaatgacacgatatggaagggcagtgggtgtggacagagacaaggagaggttcaagatgatctgagtctaattacctgttttttccattctggtacttgtgttttttatatttttggagaacagtaacttatttaaaattcatattacacctgagcattaccatctcgtatagaaaaagccacaaactatttggccaatcatttcaggggtcagtgtcactctgactgagcttttcttgtcttattcctcacctgtatattacagatgggggtcactgaggttcagagtaggagacatttcaccaagttatccagagaagctctgagttgagtcagaaggaggtgcggctcattcctatgtgatggactggaagggccaacagaatgtgttggttttttctctagaaaattgcaggatgggccaggtgtggtgactcatgcctgtaatcccagcactttgggaggctgacaggggtagatcacatgagcccaggagtttgagaccaacctgggcaacacggtgaaatcccgtctctatgaaaagtacaaaaaatagccaggcatggtgatgtgcatctgtggtcccagctatttgggaggctgaccagggaggatcacttggacctgggaagcagaggttgcagtgagccaagatcgtatcactgcactcaagcatggctgacagagtgacactccatctcaaaaaaggaaaaaaaaaattccaggaccatctgttatatacctgagcaaaagaaatgtctctttcaatgtctaaggtcctgatggcatgaatcctaaacatgcaattattttcccagaaaaatgacagtaatacgttcaaaatacacacaattgtgaacccctagctataggtatttaaaacactgaaagagaggcagtggtagaaatgagatctgagcaaatgttttcttcatgaacacatggactctgctggaacaaggttctaagtcaatccagcccatccttcaacatctgcaaagaatattatggaccagaggaacttgaggaaaatgtttacttagaggctcacagctcaccatttaatcagatgacatgaggaaagaaaatggagtaataggctacttgaactaaattttgatgttagtgtaaagaaaaaatttccttgatatctttattgagtacacattgaaacaacctaaaatcatttatcaggtaccagaaaatgtttccaatacataataaagactagaatgcaggcagtgctcaatctaaactgaacacaataaatttcagagaaaaacaattttaaaatggttaaaaaatatacatctaatgaaatgtgaggtcaaagaagaaaattcaaaacacatataatagtttgaaaatgataatgtgatgtcgtaagattctaccaaagcttatttgagaagcagttatttattttactttattttattttattgagacggagtctcgctctgttgcccggctggaatgcagttatgcgatctcggctcactgcaacctccacctcccggattcaagctattctcctgcctgtctccccagtagctggaattacaggcaagcatcaccatgctcagctaatttcagtatttcagttgagatgaggattcaccatgttggccaggctggtctcgaactcctgaaattaggtgatccaccagccttggcctccaaactgctgggattacaggtgtgagccactgcaccaggcctattttttttttttttttttaattaagaacaagctgggtgtggtggctcatgcctgtaatcccaagactttgggaggccgatgcggctggatcccttaagccctagagttcgagaccagcctgggcaacatggagaaagcccgtctctatgaggaacacaaaaatttgccctatgcggtggcatgtagctgtggtcccagctactctggaggctgaagtgggaggatccgttgaacccaggaggtttatgctgcggtgagctctgatcctgtaacagctctccaacctgggtgtcaaagtgagaccccatctccaattaaaaaaagaagaagaaggaaccactgggtcctgggtctaggggcagggaatctaaggccaattaacacgaacttttaagtccacgccatctgcttctgggtctgtgccaattagggcaggacaaaagccaggactggggggtggaaccccaggaggtgagccgggcctgagcaaggccaggaagggatgcagattaagtgggtggggcctgagtgaggccagggtggggcatgaaggacaaggggcctggtgtgggggggtgaggggggaagaggcctgggctgtgaggggttcgcaggggaatgaaggggtcagggcctgagcttccctctatctcactctccgtgtttctgttttccaggttttgaaggcgaaacccaccagtgaggctggaacagctcaggagtcagggaaatagtacctccctgagaagtgaacatggggtggtaattagatccaggaaagttccttactattgaaattaattttagcaatttaattccaaaacctcaaagttgtctagggcaggaatgcaaactagaatgcgaaatgcaaagtcctgcctgagccaaatgtacaattttatgctgacggcccacagaaccaattagaaatcctctccctttctattcttcattcactggggtgggagagtccaccctgtgctcagctccagagactttcctagagccactgcctggggtggggagcagagggctcaggccagggaggagtgaggtcaccacctgctgcttaaacacagcagggatgtgggtggggtggtgggagccaggagtcccagctactcaggaagcaggggtaggaggatagctgagctgggaagtccaggccagcctgggcgacaaagtaagaccctctaccccagagttccctcctccgtctcaataagaaaaaaagtgattaaaaaaaaaagcactgaccttgtaacagtgcatataaattgcccagttgttccttacatttgttattttatgctgcacttgttagatatgagttctaaatttctcttcaaagaatcaatgtgtcagtatgtgcaattatttgccttctacttttaaacttaacttcctcataaagcaaccttttttaatcacctgctccaccctgagtaattctccaacctgactcattccataatcatttttcccaccaaaccactcaccccatcactctttttaaattagccaatcggaattagcttagcctgtgcggtctaatcctagccgataggggaatgacacagcagcaggggcctcatgcgtctggagtaagaaccccttcctgtcccttgcccaagtgtgcactcaccattgctccatctatgaggacgcacccttctatagaagtaaattgccttggccatgtgcggtggctcacacctgtaatccccccactttgggaggctgaggtgggcaaatcacgaggtcaggagattgagaccatcctggctaacagtgaaaccccgtctctactaaaaatacaaaaaaaaaaaattagccgggcatggtgatgggtgcctgtagtcccagctacttggaagggtgaggtgggagaatggtgtgaacccgggaggcggagcttgcagtgagccaagatcgcaccactgcactccagcctgggcaacagagcaagactccatctcaaaaaaaaaaaaaaagaaagagacagagagtcaaagagagagagagaaagagacagagagacaaaaagggagtcaaagagagagggagaaagagacagagagtcagaaaagagagagagagagtagtagtagagagaaaacagtataccctattcctttaaaagccagggtaaatttaaaacctataattgataattgaaggtcttctccatgaccctataacactccaataccaccctgttgtcagtgtaaacaatggcatatcctgaaagcactgaggccactgacaacccatagcttacctatcaaaaatccttaacccagtaaaccgcggatggcccaaatgcattcaatctgtagtggcaactgctcagctaacagaagaaacagaaaaataacttttagaggaaacctcattgtgagcacacctcatcaaggaagaactatcctaagtcaaaaaaaaaaaaaaaaaaaaaaggcaaaatggtagcttactgactcaagaatcttcaagtatgaggctattctggtagaaaaagatgatttaacattaaccactgaaaattccattaacccagcaggttttctaacagggggtctaaatcttaattatttaccatgcaaaggtctgaccaggcctaggaggaactcccttccagacaggactatacagggtttctcccaggtgactgagggaaaaagacataatgggtattcaataagtgataaagaaactcttgcagaagcagagttaggaaaattgcctaataattggactgctgaaatgtgcaagctgtttgcactcagccaaactttaaagtagttacagaatcaggaaggaggccacctataccacttctaagttaatatggactgaacaaggtcttattaatagcaaagaattgaaatcccaaacttacaacgttttcaacgaaagtcaagtttgctaaaagttaacattgtaacatgtattatcctaacttctaatcttgtgaccttaggcagtctagttcacagacatgaaggaagttcactttgggaaagaatggttatcatctttgaaaaaaaaaaaaaaaaaaaggaggaaggagaatttatgtaaaaagaatgttatatggtaaattcttgtcctaaaataaatcaaatggtggtttaaagaaagggatgtttgcaacaattcagaaagttgaggcatgttgaagaattgtctgtcaaagttgtgaaaaaagaaaagttataagagggaatttatgcaagaaatgtcatataatttgaaagtaattagtcctcctgattgtaaaactgttgaagaaacagtttatgtgcaagttgtgtaaggaaagtaaaatatacttttggtaaaaggattatagggaggcagaagaatgtggatttttacctacattgaaagattaaaaaaatttgttttaaaggtttaagcaagtttcaaaatgttaattgtaaaggaaattctgtgtgtaaacatactggcaaaagttaaaggggtaatatccagtttttctgtgaactggatattaaaataaaagcacaaccagtttttcttaaagcactaacatgctcttcaacaaaaattataaaaggttaaagagtctataaaaatcttaccttatggtcagacattaacattggataaatatgtctacaaggttttattaaaattaagtttaacattaataaaacactaatataaaggtgaaatgtagcttatctggtataaaaatcatacatgaagtgttaaatataaaatggtatttggctttctttggtctaaaaactaataaaaataggtgctaaagaaaatttctcagcaagaaggcaccaaggattataaagtccactgctgatgtccccacgtttaaaacaaatgataaatttcttagaaattatatacttggtttatcctccaccttctcttcctttaaaacaagagtctctcagcacaggcgccagcttcggagtttccagtacatcagcatcggcctggggatgacgttctcatcaaaggatggaaagaatggaaactcgagccagcctaggaaggaccctatcttgtgctgctaaccactgagactgctgttcatacagcagaaagggagggacacatcacacctgagtcaagcaggtgccattatcatcagaatcatgggccactgttcctggatcaagccctaccaaattaaagctaaggaaagcttagtctatctatcttttcctttcctttcctttcccagtgcttatatccattactattcctaccactagcaactctaacccaactttagagcatttctatggtttaggagcagaggtcactggaaaggatcctataggcttctttagggtgtgcttttttctccctcctccacctcctacagctgcccctttcccaaatctatgaaatcaaactatgacatgcctcgtgccaaatgacaaaagcaagttctcagtagtagaaataggagacctaaggcaaaccatagctattgaaacagggtataaagatgtaaatgcctggctaaaatggatcaaatattccctctgcatgttgaacaaaggcaattgttatgcttgtgcacatggcaggccagaggcccagattgtcccctttccacgagggctgtcctccagtagaccaggtgtgggctggatgctagctcttttccaggattctacatcctggggtaacaagttatgccaagctctctctgtctgctatatcccaaagttcgacaccctgtgggtcagccctccagggccatccagcttccaactcccaacactaagttcactttatgtccctcatgacagggaggaaacttaacattccttggagacctgaagggatgcagagagcttaaaatttttcaaaagtttaccaatcagccactctttattcatccctgagcagatgcatagtggtattatggtggacctttactggacactttactgagtaactgaagtggcacttatgctttagtccaattggctatccctttcaccctggcatttcatcaaccagagaaaggaaaaataagacaccataaagcaaaagaagtcccttatgggtcttttgactctcacgtctatttagacacaattagagtcccatggggaagactagatcaatttaaagcccaaaatcaaatagctgcaggatttgagtcaatgttttggtgggtgacaattaataaaatgtaaactggataaactaatctatgacaaccaacagctatctattaattacactagagatgctgttaaaggaatagctgagcaattaggggctaccagccagatgtcttgggaaaatgggatagcctttgacatgatattagcataaaaaggaagagtttgcatcataattaaaactcagtgttgtaccttcatcccaaacaacactgcgcccattgaaagtaaaacaaagacattgcaaggtctgactgctctgtccaataagttagtgaacaactcaggggtaaatgaccccttttcaggatggctagaaaagtggttcggtagatggaaaagaatagtagcctcaattcttacttccctcacagccgtaatgggtgtacttattcttgtcaggtgctctgtcacaccatgcatccgtgggttggtgcagaggctcataaaaatggcagttactaaaatctcccttaactatcctccaccttatccaaagaagcttcttcttattttggaaaatcaaaccgaatgactaagccaagacatgttaaagaagtttgaagagaaagagctgtaaggaaaatgcaagagaagggaatgttagatatgagttctaaatttcttttcaaagaatcaataagtcagtatgttcaattctttgccttctacttttaaacttaacttcctcataaagcaacctttttcgatcacctgctccaccctgactcattccaatcacctgctccaccttgactcattctgatcacctgctccaccctgcctcattccaatcacctgctccaccttgactcattctgatcacctgccccaccctgactcactccgattacctgctccaccctgactcattctccaccctcattccataacatttttcctgccaaaccactcaccttgtcactctctttaaattagccaattggaattagattagcctgtgtggtctaaccctcgccaataggggaatgacacagcagcaagggccatgtgcatcagaaataaccccttcccctcccttgttcaggtacgcactcaccattgctccctctgtgagggcacaaccttctatataagtaaattgcctttctgagaagaaaaaaagaaaattttatatttggtgctatttcttttgcagcaccgaaactttatttacaacacacttaaaatgagttatatttgtcatggaaaagagtcaaactctgtaaaatattttaaaatatttattctgcactaaatatgaataatcatggcccatgacacaactctcaggaggtcctgagaacatatgtccaaggtgatggggaacagcttcttcttagacattttagggaggcattagacatcaatcaaatacatttaaaagatgcattaattttgttcagaaaggtgggacaactcaaagtgggagcttccaggctacaggtaaatttaaacattttctgattagaattggttgagtttgtctaaatacctgggatcaatagagaggaaatgttcaggttaagataaaagatgttggagaccaaggttcttttgaagtcctctgctggctgccttcagagaaaatagatgatgaatgttttttattcagacctttaaaaggtgttagatttttagttattctcttcaggattggtagggcctagaagaaaaagatctagctatgttaacagagattctttgcagacgcacatgaacccctcacaaacgatacctttgaaggaccatttcaaaatatggcacagaaacatgttttgaggtcaaatattttgactttcttctttgccatatgttttgtggtttgtaaggcatgaccccctagactctttacataggaatttggacaagataaaaaaatcagagcttacacctcattctcaaatacttttttttacagttcttccctgcaatataactacttttacgataaatgttgttgacaacataatatgctaacatcaataatttataaatgtattgtaatattaaattcactctatgtgccttctgaaaaaattagaaaatgtaccttttatcttcaagttgtactttttttttttccttcagacaggacctagttctgtcaccccggctggaatgcagtggcaggaacactgctccttgcaccctcaacctctggtgctcaagcaatcctcccgccacacctcccaactagctggagctgcaggccctcaccaccaagcctggctaatttgttagtactttgtagaggggtggtcccactatgatgctcaggctagccttcaactcctggactcaagcgatcaacccacctttgcttcccaaagtgttggggttacaggcaagccaccacacccatccaattgcaatctattttaggtgttttctttgttattctctcctgagtgttctatcaggtgggaataacaaaggctataaaatatgcagtctttaaatgttaggatttattttcatatagagaaagatcatgaaatattactaagaatacattgcagtcaagttattccgttttacttgggccctgaaaaaatataactaagttataaaattggctgggcacattgactcacacctgtaatcccagcactttgggaggtcgaggcaggtggatgacccagaggtcaggagattgagactagcctggctaacatggtgaaaccccatctgtactaaaaatacaacaattagctgggtaaggtggcacaaaactgtaatctcagctactcaggagattgaggcaggagaatctcttgaatccaggaggcagaggttgcagtgagcaaagatctcaccacagctctccagcctgagcaaaagagtgagattctgtctcaaaaaaataaaaataaaaataaaatgaaattataaatcacctcatttctgcatgtaatacttttatgactatatctgtaagttaacatgtactatgaactatgtttttctcccacatccctagctatggaagaattcatctatcaaacactagtaattagctaaaatatgattacatttagaagggaaattagcatatctagaatattagcaagtttaaaaaagcataatgtcgtcaggcatggtggcttgtgcctgtaatccgagcatgatgggaggctgaggcaggaggatggctagtgcccaacagttggagtccagcctaggcaacatagcacctcatctttatgttttaaaaattaattaagttacttatttatttttgagattgagtttggttcttgttgcctaggctggggtgcaatggcacggtctcggctcactgcaacatctgcctcctgggttcaaatgattctcttgcctcagcctcccaggtagctgggattattggtgctcgccatcatgctgggttaatttttgtatttttagtagagacggggtttcaccgtgttggccaggctggtctccaaatcctgaccttccaaagtgctgggattacagacatgagccaccgtgcatggcaaaaaagtttattttaatcagaaataattaataaatagaacatgataatgggtacaaaaaatagaataagacctattatttcataacacaacagaatgactgtagtcaatgattaaattgtacatataaaaatggggatggccaggtgtggtggctcaaacctataagccctgtctctaccaaaaatacaaaaaaaactggatgtgagcctgtaatcccagctactcaggagactgaggcatgagaatcacttaaacccagggagcagaggttgcagtgagtggagattgcaccactgcattccagactgtgcgaaagagctggactccatctcaaaaaactaaacaaatggctgggcacagtggctcatgcttgaatcccagcactttgggagccaagatgggtggatcccctgaggtcaagagttcgagaccagcctgaccaacatggtataaccctgtctctaaaaaaatacaaaattagccgagggtgatggcgcatgcctgtaatctcagatattcaggaggctgtggcaggagaatcatttgagccaagaaggcagaggttgcagtgagctgagatcgcaccactacactccagggtacacaagaagagtgtaactccatcacacacacacacacacacaaaatgctataaacagaacatcagaaaaaaaatatagaaagtcacatgtatttaaaaaccttaagcttttgaaagctgttttcccaagtaatcaaaaatgagccaataacgatgcaaatattatctttttgttttttgttttttctggagacagagatcatgcaactgcactctagcctgggtgacagagtgagactccaactcaaaaaaataaataaataaaaaattattaggccaggagcagtggctctttgggaggctgaggtgggccaatcacctcaggtcaaaagttcgagaccagcctggtcaacatggtgcaaccctatctctactaaaaatacaaaaaattaaccgggcctggtggtgtgtgcctgtaatcccagctactagggaggctgaggcaggagaattggttgaagctgagaggtggaggccgcagtgagtcgagatcatgccactgccctgcagcctgggtaacagagtgagactccatctcaaaaaaaaaaaaaaaaaaaaaaattaccaatgtcaactgaacttggaaagcaccacacatttgcacactcacacagacacaaccctctgatatggctctagaccaaatccacaggttaaaaagccctcaaatgaactcttgggccttaagcctttcaaaagatcacctgtttcctgtgaggttggggctgtggccctgatgtgtgaagacttaggaccatcctgtcatcatagaaaccctaaacaaaataaagaaggaaatttacctcaacaatataaaagaccatccatgaaatgaccacagctgaaataaccaatcaggaaaaattgaatgcttttcctgtaggatctcacatgatgctagaacgttctcaccctttctattcaatcaatactgactgtcctagccagagcaatgaaatagcaaaagaaatcaaactcatccaaatcagaaagaaataaataaaattttatttgtttgtagatgacacgatcctctgtgtagaaagtcacaaagactcaaccaaaatacaagtggaactaataaacattcagtggatttgcagagtacaatattagcaccaaaattagttgaatttccatgcaataacagtaaaaaattttaaaaggaaattaagaaaacacttccattttctagagaatttaaactaagatatacttaggaataaacgtaaaaatgcgagaagtttctaccttgaaatctatgaacattgatcaaaatgattaaaaacatagagatacaaccaatattgatagattggaaaacttaatctcgttaaatgattatacaacccaagatgatttagatttaacacaacgcccatacaaatccctatcagtttttgtcaaagaaacaaaaaaccggctgggaaaagtggctaacctctgttggccaggctggtctaaaacttctgacatcaagtgatctacccaccttgggctcccaaagtgctgggattacaggcatgagccaccacggccagctactctaagctatttctgacaagacagtgaaatgagtgacacaggaaaaggggcatctaatcaccaatgtcactgaaggctgacaaatcttattaaacaaaggaagttcagaatctgtactataaagcttgcgttacttgaagccatctaatagcattaacttgttttaaaaacctgggggcaaattaacattacttctcaaataaggacaccaggcccacagtgttcatgtacttcaccccaatttgcatgtacggtaagtgagggacaagacttgatcctaggcctgaaggatcccacgacatgtacttaagcacaatagtatgcccaggcagtacaggaaatgaccagtcacagaaaatacaagaacagaaagaaatatatcaagggggatacaagggctgagctgggacacaagcgctgagctgcgctgctgacagtggttctgaagccatccctcatggatcatgtgctgagtcatcataccctgcacacactgatttaagcggcctcctataattttgtccagtggatgaacaaggtcttgacttactcagtgagagtggtgttggaggggatgggctcacggggaaattggggtgttcagcattacaaaatcgataggctgaaaagaaacagtatttgcatccagatcaatgtaccatgtgatgcaaggccaggaaaggaagggcaagggtggagggcagaagtaatgggcatgtaggagtgaattttgtgcatgcatgtctgtgggaatataattccactaggatagaccaaatcttgagcttggacgaaagtggaactaatttagcaaatggtaaaatattgaccagaggttaactatacaaattacaatatgggcaaaggacaagaatgaacgacattcaggccaggtgcagtggctcatgcttgtaatcccaccactttgggaggccgatgcaggcagatcatgaggtcaggagttcaggacagcctgaccaacatggtgaaaccctgtctctactaacaatacagctctcgctctccctctccctctcccgctcactgcaacctccctgcctgattctcctgcctcagcctgctgagtgcctgcaattgcaggcgcgcgccgccacgcctgactggttttcgtatttttttggtggagacggggtttcgctgtgttggttgggctggtctccagctcctaaccgtgagtgatctgccagcctcggcctcccgaggtgccgggattgcagacggagtctcgttcactcagtgctcaatggtgcccaggctggagtgcagtggcctgatctcggctcactacaacctccacctcccagccgcctgccttggcctcccaaagtgccgagattgcagcctctgcccggccgccaccccgtctgggaagtgaggagcgtctctgcctggccgcccatgtctgggatgtgaggagcctgccccggcccggctagcctccccgtccgggagggaggtggggggcagcccccgcccggccagccgccccgtctgggagggaggtggggggcgcctctgcccggccgcccctactgggaagtgaggagcccctctgcctggccaccaccccgtctgggaggtgtgcccaacagctcattgagaacgggccaggatgacaatggcggctttgtggaatagaaagcggggaaaggtggggaaaagattgagaaatcggatggttgccgtgtctgtgtagaaagaagtagacatgggagacttttcattttgttctgcactaagaaaaattcctctgccttgggatcctgttgatctgtgaccttacccccaacccggtgctctctgaaacatgtgctgtgtccactcagggttaaatggattaagggtggtgcaagatgtgctttgttaaacagatgcttgaaggcagcatgctccttaagagtcatcaccactccctaatctcaagtaatcagggacacaaacactgcggaaggccgcagggtcctctgcctaggaaaaccagagacctttgttcacttgtttatctgctgaccttccctccactgttgtcctatgaccctgccaaatccccctctgtgagaaacacccaagaatgatcaattaaaaaaaaaaagaaaaaaagaaaaaaaaataaaggaagaagatacaatcaaaaaaacaaaaacaaaaacaaaacaatcaaaatcagcctgcagttcacaccacaaagcatgagtgagactgggctggaagttggtgaggggcattttgcttttgaatattaaagacagacaaattgagaagtaaaaaaaaaaaaaaaaaaaaaaaacaaaaattagccgggtgtggtggtgcatgcctgtaatcccagctactcaggaggctgaggcaggagaattgcttgaaccctggcagtggaggttgcagtgagctgagatgtggccacttcacaccagcatgggtgacagagtgagactctgtctcaaaaagaaaaaaagaaaaagagatccaaaaaatcagcagtatggcggtctgaggtaaaagcagttttacgtctcttaaattaaatggcctctgatttccagtgtcaaatgaatactcaacaaaatcccccttgtagattgcagaattgtgtatacacatgaaaaaatgagtaaactctatgaagagtacagcaatgggggagaccacaggcgtgaagaatgatccctagctgagtaggtagagatcggtttgtgaaaaaagagccaggccagaggggatggctcatgcctgtagtcccaacactttgggaagtggaggtgggtggatcatgaggtcaggagttcaagaccagcctgactagcatgctgaaaccccatctctactaaaaaaatacaaaacattagctgggcatggtggcacgtgcccatcatcccagctgctcgggaggctgaggcaggagaattgcttgaacctgggagtcggaggttgcagtgagccaagattgcaccactgcactacaacctgggtgacagagtgagactgtctcaaaaaacaaaacaaaacaaaaaacaaaacaaaacagacccagatggagattgttgcctacatgtgtgattggtcaaattagtgaagaaaaacaataatgcgctaactaaaatggttgcatatgaaaattagaggataaggccaggctcggtggctcaagcctgtaatcctagcactttgggaggtcgaggcaggtagatcacaagatcagtagttcaagaccagactggccaagatggtgaaaccccgtcttactaaaaatataaaaattagccaggcatggtggcaggcgcctataatcccagttacttgggaggctgaggcaggagaatcacttgaacctgggggacagaggttgcagtgagctgagattgcaccattgcactccagcctgggtgacagagcgagacttcatctcaaaaaaaaaaaaaaagaaaaaagaaaaaaaaactggagggtaaatcttgtttcttatgtaaaaacaagggtgtctcttttcctggttcctatattatttgaagtcatatccctggacttttaaacacaatctctggaataaatgagacatgaaaagtgaaggtgacagactagcaaatgccaggccctcatatcctcatggagacaccaactcaacaaaaatgtttcatcaaaaatatctttgtaggccaggcatggctcatgcctgtaatcccagtactttgggagaccaaggtgggtgtatcacctgaggtaaagagttcaagaccagcctggccaacatagtgaaaacctgtctctactaaaaatacaaaaattaagccaagtgtggtggtacatgcctgtaatcccagctactcaggaggctgaggcaggagaatcacttgaacccaggaggccaaggttgcagtgagctgagatcacacaactgcctccaccctgggtgacagagcaagactccatctcaaaaaaaaaaaaaagaaatgaacactaaaatatagggatttcattcaacctcacaagctcccttaataagattgatgaaaaccatatctgttacagggttgattctacaacaaattgaacaaaggttttcttgttaaaaatgaacagtgacacatattggtgtgaaaaatgtgaaatgaacaacagttcagtcaagagcctcataggaggctgtgagcccaaatgacatcctcagtaggaggaattttaacaccactgactgctgcttagagaagacgatcattagtttatgggatgaacattgccacagtgccactgagagaagcttctatgatgctcctcaaaaaccagaatggctcaggcatggtggctcatgcctgtaatcccagcactttgggaagccaaggtgggtgggtcacctgtggtcaggagttcaagacaagcttgggcaccaagatgaaactccgactctactaaaaatacaaaaactggccaggtatggtggagcatgcttataagccctgctacaagggaggctcaggcaggagaattgcttgaacccagaaggtggaggttgcaatgagcacagattgcaccactgcactccagcatgggtgacagagggagactgtatctcaaaaaataaataaataaaagaaagcatgacagctggaaacacttatcagtcagtgtgatgctttctatctcataacctggtccacgctgacaattctgctcagggtttccagggcgcctctgcctagagcaggatgatgttcaatcataacagtcaaagtgttcttcatgaattttctgtttttatgcaaactcactccataggggagtgcctaacaagctatccatgactgataggagggtcatcactgcagaaaacaatgacacgtacatcaaaagcatgtatgggggctgggcacagtggctcacacctgtaagcccagcactttgagaggctgaggcgggtggatcacctgaggttggggttcgagaccagactgaccaacatggagaagtcctgtcgctactaaaaatacaaaattagccaggcgtagtggcacatgctggtaatcccagctacttgagaggctgaaggaggagaattgcttgaaccttggagacagaggttgtggtaagaagagatcacaccactgcactccaccctggacaacaagagggaaactgtctcaaaaacaaacaaacaagaaagcaggcatggggcaaaatcacaaaacagaacacataaccaggcagagccaagatagacaagagcagatttctcatgtttgcagggacattttcatcacccacagactctaggtacctgtagctctcccacatcacttccctgtataaagccctctgcgcagggttcaggcatttccactcctccaaagagaattctatagccacatccctgaaagtaaaatgtccctaaaatgaaacacacatttccacaaaacatcatggaggagtcagttatcaccttcccacaaaatgagaaaagagaaaataagtactaatttgatcaaagactgtgttctgacaaacccacgttaaggtattttggcacattttttctccacagttgtgttttattgtacttttccacaaaatattttttttttttttttttttttttgagacggagtctcgctctgtcgcccaggctggagtgcagtggcgcgatctcggctcactgcaagctccgcctcccgggttcacgccattctcctgcctcagcctcccgagtaactgggactacaggcgcccgccactacgcccggctaattttttgtatttttagtagagacggggtttcaccgtgttagccaggatggtctcgatctcctgacctcgtgatccgcccgcctcggcctcccaaagtgctgggattacaggcgtgagccaccgcgcccggcctccacaaaatattttaagatcccttaagtcactgtggatgtctcggttttatggacaatgtaaaaaatatacaaataaaaaggaaacacagggcttggtgtggtggctcatgcctgtaatcaaaacactttgggaggccaagccgggcagatcatttgaggtcaagagttggaaaccagcctggccaacatggtaaaacctcttctctactaaaaatataaaaagtagccaggcatggtggcaggcacctgtaatcccagctacacaggaagctgaggtaggagaatctcgagcccaggagacggaggctgcagtgagttgagatcacaccactgcactccagcctgggtgacagagtgagactttctcaaaaaaaaaaaaaaaaaaaaagcaaacgaacatagagttttctctacagatagtatgttcaacataacaggtgatattcattacctagatgagctgaaatacaagtggtgtctagagaggacaaagtccaatgaatttgatagaaaagaaaagagagtaaagtccaaaactgaaaactgttgtgatgacagcaatagccatgaataacatttttgaatgcttcccatgtgctatacactgttctaagtgcttcccatgtcttaagccataaaataacatactgtcccatgaagaaagatctgtacttggagacaagtgcatcacacatactaggaaaattaccacaaatcaaatagctaaaaatgtcaacacaagcactgaatccagatgtctgggattcagatttgaatataaccacctaagtaaaagatacagcttcaaaactaaactgacacaggtttatctaatggagagaacatgaaataggttcaagggtaagaacatggagcatcctacaaggtcattgaatggacacacagggcatgaatataatactgtacaatccttcttactatttttccttttaagacagagtctcactctgtcaaccagcctgaagtgcagtggcacaatctcagctcactgcaacctcgtttgcccaggtctaagcaattctcctgcctcagcctcccaagtagctgggattacaggcacctgccaccacacccagctaatttttgtatttttagtagagacgaggtttcaccatcttggccaggctggtattgaattcccgacctcatgattcaccctcttcagcctcccaaagtgctgggattacgggcatgagccaccgtgcctggcctgtttttactattaactcattattgtgatagttgacaacaatgaaaaatacttaaaattattaaaattataaaaaaaaaacttattgcaaatgatgtgttttctacgtaaccatggacttatccatccatgtattctcccaagatgggaggatccctagaggtcagtagatcaaggctatagtgagctatgattgcaccactgcacttcaccctggacagaataaaaatacaatataaaaaataattctggaagtggtggctcatgcctgaaatcccaacactttgggaggctgaggtgggcagatcacaaggtcaggagttcaagaccagcctggccaacatggtgaaactccatctctactaaaaacacaaaaattacccaggcatggcagtgcatacctgtagtcccagctactcaggaggctgaggcagaattgcttgaacccaggagtcagaggttgcactgagctgagattgcaccactgctctccagcctaggcaacaaagcgagactccatctcaaaaaacaagaaaaagaaaaagaaaaagaaaaagaaaaagaaaaagaaaagatgtagctatgtgtggtgacacatgcctatccttctagctctttgggaggctaaaatggggatcacttgagcccaggagttcaaggctgctgtaaactagaattttgccattgtactccagacctgggccacagagcgacaccttctctctctgtctctctttttttttctagatggagtctctctctgttgcccaggctggagtacagtggcaccatctcggattactgcaacctccaccttccgggttcaagtgattctcctgtctcagccttttgagtagctgagattataggcatgtgccaccacacccagctaatttttgtatttttagtagagatgaggtttcaccatgttggccagctgctctcaaactcctgacttcaagtgatccacccgccttggcctcccaaagtgctggcattacaggggtgagccaccacagccagccccacatttacattatggcatcttgacttgatcctcagctcctcagctgccctgtgactctgtgtgtgtgtgtgtgtgtgtgtgtgtgtgtgtgtgtgtgtgtgtgtgtgtgtatgctcacgtgttgtgacaggcaaggaaaagccagtagagcatcatcgccactggcctggcaggaggaggtggccctcgggctgcagttcactgtgctgtttgcactctgattcttggaagaatctttcctgaagtcacggagcctccagctcctccggaacagaactagttgtgtaggagtgtgtccttcatgcccctcaggtccctgaccttctccccacccttcctgaagggaatccaaagggaagggcaaagtccctgcccataatggccaaactgggtcctggtgatgtgcagagcatggaagacctgggagctggagtgaggcagttcacacagatgacaaaaatggagatgcctcaggactggctgaagatgcagggtctggtctgtagggcttttctgaccttagagaggccttctcctcttattttgactaaaacaaattgccacaggaagtttagatcaattagagttgaaatttccagaagaaatgtgggaacatcctcacatttgccccagcccctcagtcttccgaggacacctcagcatctaaactgcaaccccagagtaggtgctgctgttgtcctgtggccaagatggtaattgtgcatccttcaagtaagggagacacaacacacaaagtaatccatgcagaagggtgtttctgggcgggcacagtgactcccgtctgcaattccagtacaccgggagaccaaggcaggtggatcacctgaggtcacgagtttgagattagccatgccaacatggtgaaaccctgtctctactaaaaatacaaaaattgagctgggtgcagggctcatgcctgtaatcctagcactctgggaggccgaggctggtggatcacttgaggtcaggagtttgagaccagcctggccaacatcgtgaaactgcatctctactaaaaacataaaaagtagcctggcttggtgggcatctgtaatcccagctactcgggaggctgaggcaggagaattgcttgaactctggtggtggaggttgtagtgagccgagatcacaccactacactccagcctgggtgacagagtgagactcaaaaataaaatataataaaataaaaataaaaatacaaaaattaaccaggtgtggtggcacacccctataatcccagctacttgggaggctgaggcacaagaatcacttgaagctaggagacagagattgcagtgagccaagatcacaagagtgcactcatagtttggacaatagagtgagactctgtctaaaaaaagaaaaaaaaaggaaagaaagaaaaagtgcttctgatatgattgatgcagagataataaaacctgagtaacgtgatagagactggtgggcagagggaacttcagatgtgggtgggagggcatgggagacagctctgagcctagaactgaaggaggagaaagggacaatgcagtgatcatttagggacatagggtaagagcagggacaatgacctgagacagaaaaggttttggtgtttgggaaaaaaaaaatgtgactggggcagagggagtcatgagatgagggcaagctcccaggaggctggacactggcaggggccctggacacagggctgtggagccacagtgaggagttgggcttttgtcctggggaacacgggaagccggtggagggttccctgccaggcactgacatgacctgctttagatttggctgtgatgtcctcatacagagaaaggccccgaagatggtctctgtgtctgagtctaccgctctgtttcttccattcttctgcttttcttcatttttggggtactgcatcccatttaaaattctagttacaactgggcactcccctctcccagaagaaaagccacacccagacacccactctattttgccaatcatttcaggggccagggtcactcagggtgagcttttctggtctagcccctcatctccaagttgcagggacgctcactgggctcagagcggggacattttcaccgagttaccctgagaagatctgagatgagtgagaaggtgtgtctgaattcttacatgggggcctggaagggctaacgggaagggttggtctttatcacccctatccttgaaaattacagaagcatctttcaaatacctgggctaaagaaacttcctttacaaagttctgatgccactgattcctgacatttaattcttccttaaaaaaaaatcacagtcacattcataaaatgcagaagtgtgaacacacagtaattgaccttgaaaacagggaaagaaagtcagctgtagaactaagacgtaagcgaactgtttcaatcaagaatatatgggtggtcaggcacggtagctcttgcctgtaatcccagcacattgggaggtcgaggtgggcagatcacctgaggtcaggagctcgagaccagcctggcaaacatggtgaaaccttgtctctactaaaaatacaaaaaatgagccaggcatggtggcaggcaactgtaatcccagctactcaggaggctgaagcaggagaatcacttaaatcctggaggcaaatgtttctgcaagctgagatggcaccattgcacttccagcctggggaacaagagtgtaactgtcacaaa[132 bp omitted]cagctcaagattttaacaaatgacataaggaaagaaaactgaaaaatagactaactggttaaactgcattttgatgttaaggtaaaaggtcactgacatctttaccaggtacacactgaaacaatcaaacttctgtatgaggtaccaaagttttccaataaataataaaaactagaaagcatgcagacctcgatctgaactggatgcaactaatttcaaaccgaaactatttttaaattgttttaaaaaaaaatctaacaaactctgaggtcaacgggaacttaactggaacatatacatgtacagaaaggaatgatgtgagctggttataggatgccacaaagccatctttcagaagtgattaagtattaaaaaagatactcttaaaactaagatttttctcaaactccaactgcaaaaaaattacatatatatatatatatatatataaataaatgagaaaccagaaagaaaaaaaaaaagaaatctattacacaacaagaacaaaagcacttttgataccccttttattttttattttttgtttgtttgtttttctgagatggagactcgctatgccacccaggctgcagtgcagcaacatgatttcagctcactgcaacctctacctcccaggttcaagtgattgtgtacctcatcttcctgggcagctggaactacaggtgcacgccaccatgcctggctaagttttgtatttttcatagagacggcgtttcaccatgttggccaggctgctcttgaactcctgaccttacgtgattctctcacctcggtctcccaaagtgctgggattacaggcatgagataccacacctggctttgatgtccattttagaaagtactatgggctgggtgcagtggctcacatctgtaatcccagcactttgggagatcgaggtgagcagatcacctgaggtcaggagtttgagaccagcctctctaacatggagaaaccctgtctctactaaaaatacaaaattggcccagagtggtggcgcatgcctgtaatcccaactactcaggaggctaaggcaggagaattgcttgaacccagaaagcagaggttgcactaagctgagattgcaacattgccctccagcctgagcaacaagagtaaaactccatctcaaaaaaaaaaaaaaaagtactatgtaggccaggcgcagtgcctcaaccctgtaatcccagtactttgggaggtcaaagcaggaggatcctttgagcccaggattttgagaccagcttgggaatttaaaaccccgttttacaattatatatatagatatataatttatatagctatataaattataatataaattataatttatatatatataatttatatagctatataaattataatataaattataatttatatagctatataaattataatataaattataatttatatatctatataaattataatttatatagatatataaattatatataaattttatatataaattatatatataaattatatgtgtaaattttatatatatataaattttatatatatatatatataatgtatatatatataatgtgtatatatatatataatgtatatatatatatatatatatataatgtatatatatatataactagccgggcttggtggctcatgtctgaggtcccaactactcaggaggctgaggtaggaggatcacttgaccccagggggccaaggctgcagttagaggagatcacgccactgcactccagcccgagtgatacagccagaccctgtctcaaaatattaattaattaaattaaaagtattgtgtaataacagaaagtgatttttgttgcacttcactgccccacgtcctaccccaccctgggaaaagggaagagagtaacttccaactcaataagtcactgctctctggctgaatagggattccaactggaagctaacctctgatgccaagatttacagaatgtacatgtctcatagacaggaattttaaaattctcaatctcatctttataatttaatcaagttttaaattattagattatatacacagaagtcaacatgtcacaactaatcatagccaataaactcacctactcatctgatcccaaagtccccctgccccttcttttctttggtaacagggtctcactctgttgaccaggctgcagtgcagtggcatgatcttggctcactgcagcctggacctcccgagctcaagtgatcctcctcccttggcctccagagtagctgggattacaggtgcgcaccatcatacccgattaatttttttttttttttggcagagataaggatctcactatgttgtgcaggctggtctagaactcctggactcaagcaatccccctgcctcagtcttctaaagttctgggattacaggcatgaaccactgtacccagcctctctttcttcattactttgcttccttccctgattctgtacgtatctctcattctccccttctctctctagctcttgttttattttcccccggggttctgctcctcattttgtacctctctcctctcctgctgtttatccccttcttcactctattccttctcttccacctcttctgctccatccttgtaacttatctaacatcttgctgctcttctccccaatcttttgatcatcctctatctctatatggacagaaatttaaaaataataagtactgcatttattcactccaagaaaagtaaaagctaaggcccacaatgtggcaaggcaaggtttaaaaataaaaagaaaagaacaagttttcctctgcctgtcaagctcacatcaagaacggttacaggataacgctgtccgaatagccaagtctaaatgaatgggctccagacacccccaccttccagagcaaggttgaaggaaaaaaaaaaaaaaaaaaaaaagagagagattattttactgttactctttttccaggcttcttaagcattattatgttttacaaatgtctgtatttagtcagttcttgtttttcctttgatgcagctacaaggccaccggcaacccaaggtcacaagatatgttatgctatagattacacaacctgtcactgtataattaactgcttttgttttgcttttgtaaggccacttataaaaaccctgctctgtctttgttcagtgctcagctttttggatatgaatccactgagccagtgcgtacctaaaataaacaattctgtttctctcatattggtctctccattcttcagtttcccctaacacaaatatttccgcctcttctcccatctcagcgcctcctctgctctccctgttacattctctcttccctgttataccctcatccccactctctagcactccagatccccaggtgtcctccctgctgtgcttctccctctgttctccttgccaccagcaccactctgctctgtctgccctggctccaaatccctcctcctctccctcaccctgatgagcctccctctttgctgcccctctccctaccttgctgtccttcatgtctctgtacatccagcttttctctacatttctgcacttgcttttctcctcctgctttcttatcgttttcttttcacttttgctgtctcttggcaaatccctcacccatcctctactttgccatctcttatggctctttctcattcttcttttctctgtctcaggttttccactgctctctgtccgtctcctgatccctttggcccacacaatcacaggagggtttggagtaagacgcctgcatcccggaggagcttattttccaggggctggaactgggcaggcaagaacaccccgtgtcacaggacaggccccgggcacctccccaacgcgggctcaggagaagcggtgactgcggaggagagacctggggagcagcagggcccggcacgaggagggaggtggggggcgacggcgcctgaggacaagggtggggtctgcaggatcccaggactaggcagaggacacggcctccccgggacaggggccgcggcgctgcgcttcagaggccgacaagggcaaggctgggaggtgcccacggcgggaatccacttcgcgggtgaggacgttaaaaagcgcggggcgggaggagtctgaaaatgattttgagaaaaaaaaaaaaaaaacaacaacaactacgcgataggaagtgtatacattgccctagagcagaaagacaggggatgggaccaacctcagggcgactttagacccaaaaggaagcgacttccagactctcacggggatgtctctatttgctctgggtgaagacgggagagaagttccagatctgtggggaccctaggtccgagggacagaaacgctgaggacctgggaaatgcagacttaatacaaaacagcgaaactcaccgccgcggtgtgaccgtcactccacgcgatccgcttccagatttgcgagaatctgcgcgcgcaggacagaagccaggcctcggcgggccccgcgaggtggtgggcggggcctgggccgggtggcggcggggcgcgaagcagagagactttgcggtttagaaccggcagagggcggggccggggcgggacctgtgtgtctcacatcctggctcccagcgcctctgtttttcgggtttgggaggcgacagcggccaggaagtatgaggcatgattcaaaagccctggaattttctggaacggggatgcaaactagaatgtgaaatgcaaagccctgccagggcggaacataggatttcatgctgacggcccacagaacagaacagaactcctctccctttctattctccattcacaagggagggagggtccgccctgtgctcagcttcagagacttccctaaagccactgcctggggtgcgggacggagtgctcaggccagggaggagtgaggtcaccacctgctgcttaaacacagcaggggtgcaggcgcgaaggcgggagcctgaggtcccagctactcaggaagtaggagcaggaagatcgctgagccctggggtccaggccagcctgggcgacaaagtaacaccccctcccgcaaggccaccttccttgtctccctctctctccgtctctctctctctctctctctctcgctttttaaacctttttaaataaaatttttgatggtgtgacatagggatccaacattattctgttccgtgtggatatccagttagttgttccagcacatttgtggaagaaatctattacttttttttcacgtttttcttttctttttctttgagggagtctccctctgtcgcccaggctggcgtgaaggggcgtgatctctgctcactgcgacctctgcctcctgggttgaagcgattctcctgcctcagcctccggagtattacagtattactggtattagaggcacgagcgaccatgcccggctaatttttgtatttttgatagaggcgggctttcaccatgttggccaggctggtctcaaactccgaacttcaagtaatctacctgcctcggcctcctaaagtgctgggactacaggcgtgggctaccttgcatagcctaaggaatgctctttactgtttaaacgttgagaaaatataattgaaaacaaagaaaatcttcccccaaatgggtaattatctccacgacaacagagaaataaataaaaaccattttaataaagaaccttagactcaaatgtgatgggaaatagaggcaaacagctatgaggttgaaaagagagaaagaaatgtcactgttctatacaacccattaagcacatgttttcaagataaacactaatcagtcctcagggaaggggatttgacaaccccttgggtcacacatacttcatcctggctttacttggtaatggaggtgaccatctgtgtcagctaattagcttcatcccgagggagggggaaaaaccctaacccatgtctttttgacaagtgtgagtttcacaacatggggacaggtgccctctctggtgagactcctacaatacgacagacactgatgtcagaggtaaataataaaatttagaatatatgattaagtgcagagtttgtttgaacacaaagcttggaaatagccacctggaaacatcaacttcaaatgaataggatcagcgttctcaggtggagacgttaagattttacacacataggaaaagacagagaagctttaccagaatcacattttccattcaagaccagtgcctagggtgcagcaacttgactggtgatggattgatacacttcaaggaaggttactttatcactccataagaagggacaatgatgccaaaaggtcttaactctggggctgcttagtcttcctaattatttacagaataacctttttttttttagttgtttgtttgttgttgctgtcattttttcagacagcgtctagctctgtcacccaggctggagtgtactggcactatctcggctcactgcaacctccacctcccgggttcaagcagttctcctgccccagtcagccaggtagctgcgattacaggccagtgcgaccacgcctggctaattgttttctgtttttagtagatactgggtttcaccatgttgggcttctccattaatctctcctgcacacttcagaccacatccacacacacttaaatcaacttcagttcagagatgagaagcaaaaacctagagaggacacatccacagttactcaccaggctgaggtgggaggattgcttgaccctggagagcagaggttgaagtgactcaagatcgcaccactgccctccagcctgggggacatagtgagaccccgttacccacatccaccaaaaagttggaaatgcattgaaataagagacagcttcaagaaactataaaagcaatgcatgcagaaaattcaaaggtcaaccaacatacagaaactatgaagaactacacagaaactcttgggctaaaaatagagtaactaaatgaaaaaacgcaatacatgggttcaaaatcagaattcattaggtaaattaaaaattagtgaagaggggatgggtgaggtggctcacaccaggactttgggaggacaaggtgggtggatcacttgagctcaggagtttggagaccaacctggccaatgtggtgaaaccttgtctctactaaaaatacaaagattaacagggtgtggtggtgagctcctgtagtcccagctactctaggggctgatacaggagaagcacttgaacatgggaggcagaggttgcagtgagccgagatcaccccactgccctccagcctgggcgacaaagcaggactgtctcaaaaaataataataataataataataaaataggccaggcctggtggcttatgcttgtaatcccactataaaaaaaaaatacagaaaattagccaggcgtggtggtgggcacctgcagtctcagctactcgggaggctgaggcagaagaatggcatgaacctgggaggtggagcttgcggtgagctgagatcatgccactgcactccagcctgggcgacagagcaagactccatctcaaaaaaaaaaaaaaaaagaaatttatccttactacttactgtctacacatagataatcaaaggcaagtagttaaagacatagttaaaaatatgacaaaactggccgggcatggtggctcaagcctgtaatcccagcactttgggagaccgaggtgggtggatcacaaggtcaggagatcgagaccatcctggctaacacggtgaatccccgtctctactaaaaatacaacaaattagcagggtgtggtggcgggcgcctgtagtcccagctactccggaggctgaggcagaagaatggcgtgaacccgggaggcggagcttgcagtgagccgagatcaacccactgtactccagcctgggcgacagagcaagacttcgtctcaaaaaaaaaaaaaaaaaaaaaagacaaaactgacacatgtgcccatacaagtgtagcatggattcaaccctgatgccatgtttagaaagtagttcccagcactaggaggatttaaaactcttataataggagttattatagtaatagaaacctgcttactgctgccttgtttgctacctgtacttcttcaaacgataaaaagcttcatcgctattttagttcaccaaaatgcttcagcacaagtgtactatatgaatcactatcaatctgttgcacaaaaagacataagcagcaaaaataagagtgagaattcccactaataaaaagtgagactctcaaaggggggaaatgagggaagagagagagaccctctcatattgttttatattgttttatactcagtacctgttttaagaaaaaaacaaggaagtgaaaccaaaggcaggcatcccgatgccaggcatcagacctaaaaccagacctgaaaccaggcctcggcctgcctggcctaaacctagtaattaaaattccacccctgacctagcaactgatgttatctatagatcccagacattgtatggaaggacattgtgaaacctcctgttctgttctgtttcactctgaccaccagcgcatgcaccccctgtcacataccccctgcttgctcaaatcaatcactaccctttaatgtgaaatctttagtgttgtgagcccttaaaagggacagaaattgttcactcagagagctcggattttaagacagtagcttgccaatgctcccagctgaataaagcccttccttctacaactcggtgtctgagaagttttgtctgtggctcatcctgctacaacctgagggcaggagttcaagactagctgggccaaaatggtgaaaccccatctctactaaaaatacaaaaaaaattagttgggggtggtggcactggactataatccccaactttttgggaggctaaaacaggagaattgcctgggaggcagagtttgcagtgatctgagatcatgccactgaactccagcctggataacagagactttgtctcaaaaaaaaaaaaaaaaggccagaagaggtggctcacgcctgtaatcccagcactttaaaacgctgaggcggacggatcacgaggttatgaaatccagactgtcatgactaacaaggtgaaataccatctctactgaaaataccaaaaaattatccgggcgtggtggcactcacgtgtagtcccacatacttgggagcctgaggtaggagaatcacttgaacccaggaggcagagtttgcagtgagccgagatcacgccacagcactccagcctggctaccgggtgagactccatctcaaaaaaaaaaaaaaaaaaaaattaaccggccatggtggaactcacctgtggtcccagctacttgggaggctgaggttgggaaatggcttgagcctgaaggaggttgcagtgagctaagatcacgccattgctctccagcctaagcgacacagcaagaccttctctcaaaataaaatcaaatatatgaaaacagaataactcaaagtacaaaaatccattttgttgatataggtccacaaaataataaaacagagactcgcaagaaactacatgctaataaaaaaaagttgtcattttccccagatcttttctttcttcctttttttttttttttttttttttttagacagggtctcgttctgtcgcccaggctgcagtgcagtaatgcaatcttggttcactgcaacctctgccttctgggttcaagtggttctcctgcctcagccacagagtagctgggattaccggtgcccaccaccatgcccggctaacttctgtatttttagtaaagatggggtttcaccatgttggccaggcttgtcttgaactcctgagctcaggtgacccaccaacctcagcttcccaaagtgctaggattacagacatgagtcaccacatccagcaaattttcaaaatatatacatatatgtgtgccaatgtgtacgtatatgtatgtgtgtgtgtgtgtgtatatatatatataaagatttttaaaatataaaaagtagcaagttttgtttaactgaagaggaatctcatcttgctggaaacggatactttgatagttggggacagggaggaatcttgtcagatctaagaaaacaggaaatgtcccctcctagaggaagcaatcaccctttcaactgcctgacatggaggaatctttagatatctgtaggaatgcaggcatgctcagatgcagccactatggcactctttatacagagaaaaattgcaaaggacccacatactgtcattcagccaatttccaatgcagatgtcaaagagcaagctagccatgtttactaacataacaacatgtaaattttcacaactagcaggatgaaatatcaaagtaaaatatttactaaaacacaaagaaaacaatagacgctggggtctaggtgagggtggagatggggaggagagaggagcagaaaaaatagctaatggggctgggcacagtggctcacgcctgtaatcccagcactttgctagggcaagggggttggatcacctgaggtcaggagttcaagatcagcctggccaacatggtgaaaccctgtctctactaaaagtacaaacattagccaggcatggaggcatgtgcttgtaatcccagctactcaggaggctgaggcaggagagttgcttgaacccaggaggcagaggttgcagtgagccgagatcatgccatcatactccagactcaaaaaacgagcaaaactcagtgtcaaaaaaaaaagaaaagaaaaaaagctactgggtactgggcttgataccggtgtacaacaaactccaatgacatgagtttgcctatgtaacaaaccatcacatgtagccccaatcctaaagtaaaaacataactataaaacattttatttttttaatttactacggaattatttttaaagtctcataatgatgcagaaatacaggtgtacaagacttgctctgacacttggcacagaactgacagtagcggctccccagtgagtttggaaagagggtggaggacgtgacagggaaaggagatgctttgtggcaaagggtctgcagctttgctaagagttttactagaaaacaaatatatccatcctgtgatgtttaaatatcaaaatatatatttaataaacattggtagagctgagcacggtggctcgtgcctgtaatcccagcactctgggaggctgaggtgggtggataacctgaggtcagaactttgaggccaccctggccaacatggtgaaaccccatctctactaaaaatacaaaaaaattagccgggcgtggtggcacacgcctataaccccagctacttgggaggctgaggcaggagaatcacttgaacccagaagacagaggttgcagtaaactgagatcatgtcactgcactccagcttgggtggcagaggctgactccatctcaaaaaataaattgtaaccatttttaccaaaaacacctgtttcacaagcctctccacagtaaccccacagtctccatgagcttaatgtgttaagaatggtttaatgaatctcctgctattatttaggttgatttcctattcttaaactaatgatggaataaaacaccttctatcattcatgtctgtgtatgaactttccactctaattagttcgatttttggagccagaaacacaataactcactcaattacctaaaaatgtagtatgaaagtgaagcggtgggttgcccctccacacctgtgggtgtttctcgttaggtggaatgagagacttggaaaagaaaaagacacagagacaaagtgtagagaaagaaataagggggcccaggggaccagggttcagcatatggaggatcccgccagcctctgagttcccttcatatttattgatcattttggggtgtttctcagagagggggatgtggcagggtcataggataatagtggagagaaggtcagcagataaacacgtgaacaaaggtctctgcatcatagacaaggtaaaaaatcaagtgctgtgctttagatatgcatacacataaacatctcaatgccttacagagcagtattgctgcccgcatgtcccacctccagccctaaggtggttttcccctatctcagtagatggaacatacaatcgggttttataccgagacattccattgcccagggacgggcaggagacggatgccttcctcttgtctcaattgcaagaggcgtgccttcctcttatactaatcctcctcagcacagaccctttacgggtgtcgggctgggagacggtcaggtctttcccttcccatgaggccatatttcagactatcacatggggagaaaccttggacaatacctggctttcctaggcagaggtccctgcggccttccgcagtgtttgtgtctctgggtacttaagattagggagtggtgatgactcttaaggagcatgctgccttcaagcgtctgtttaacaaagcacatcttgcaccgcccttaatccatttaaccctgagtggacacagcacatgtttcagagagcatggggttgggggtaaggtcatagattaacagcatctcaaggcagaagaatttgtcttagtacagaacaaaatggagtctcctatgtctacttctttctacacagacacagtaacaatctgatctctctttcttttccccacatgaaagcaggcagaaaagattttcacttattggtttccttttctagaatttaccacgtactttgtgcacattaatacgtgacttccattggcagctgctctaatcctgctccacagagagctgacagtgcatccatatgtggcccctgaacaatcccttctgcccaacagcactgacaccacgggaccctcaccccgtctccatccatgtctgggtgtgagcccttcccaggcccatgcccagtgcagcctctttccaacttcatgtcactaggtcaccagagatggaatctaagcgagatgagagggactgagggaaggcatgggtgagtgtgagtaaacgtatcaggcaggaagcttcagactcagagaagattcccaactccaaggcccagggtttctgaaaggaaggagacagaacaatccaccgagaatatcatctcacctgaggaagagccatccctgactcctttgctttcctcttcctcttccgggtttcttcctcatgtaccaagagtctttaggagtcaatcctgaatgttaaaaatatgttgtttgttgctcagaatcaacacaccccctccctggaacacaaccacacatgcgaagtgtcacgcacgtctgtgggaagaggccaccaaacacgctttgtgtgagcaacgaggctgtttatttcacctgggtgcagccgggctgagtctggaaagagagtcagcaaagtgtggtgggattatcattagttctcataggttttgggacaggcggtggagttaggggcaatgctttgcaggcagggggtggatctcaccaagtccattctcaagggtggggaggattacaaagagccttctgaagggtgggggagattacaaagcacattgatcagtcagggtagggcagaaacaaatcacaatattggaatgtcatcagttaaggatatttttacagttgcttcaggctatctggatgtatacgtgcaggtcacaggggatatgatggcttagcttgggctcagaggcctaactaaagacctcaccctgaggaaatagtgccccctgctgccctcctcaccatggatgataaactcctacagggaaactcccgctccccttctggaggagtccacacacaagctgcagcagtggggagctgggctggaatgagctccccttcagggcacagacccagccctgacgaaaccccacgcagaggctgggtgcggtggctcatgcctgtcatcccagcactctaggaggctgtggcaggtagatcgcttgaactcaggagtttgagaacagcctgagcaacatggtgaaaccccatctctaccaaaaatacaaaacttcgccaggtatggtggtgcacgtctgtgtgtctgtggtcccagctacttaggaggcataggtgggaggatcacttgacctgaggagtttgagagcagcctggccaacatggtgaaaccctgtatctactaaaaatacaaaaatgggccgggcgtgtgggtcatccggtaatcctagcactctggaaggccgaggtgtgctgattacttgaggtcaggagatcgagaccagcctggccaacatggtgaaacgctgtctctactaaatacacaaaaagtagccgggcttggtaagtgtctgtaatctctgctattcaggagactgaggtaggagaattgcttgaacccgggaggtggaggtcgcagtgagccgagatggcgccactacactccagtcttggtgacagacagactcaaaaataatataaaatggaagttaaaatacaaaaattagccgggtgtggtggcagacacaccagctacttgggaggctgaggcaccagaattgcttgaacccagcagacagaggttgcagtgagccaagatcaagaggctgcactcataggctgaaagatagagtgactctgtctcaaaaaaaaaaaaaaaaaaaaaatgcatttctgatgtgattgatgcagacaatgaatcctgagtaacgtgatacagactgatggacaagggaactacagccgggggtgggagggcatgggcgacagctctgagcctagacctgaaggaggagaaagtgacagggtacgtagggtaaaaccagggacaacgacctgagacaggaagggttttgatgtttgggaaaagagaaaagcaaatatgactggggcggagagagtcatgagatgagggcaagctcccaggaggaggctggacagtggaaggggccctggacacagggctgtggagccacagtgaggggttgggcttttgtcctggggaacacgggaagctggtggagggttccctgtcagggactgacatgacctgctttagattttgttgtgatgtcctcatacagagaaaggccccgaagatggtctctgtgtctgagtctacctctgtttcttccattcttctgcttttgtttttcatttttagggcactgcatcccattgaaaattctaatcacaactgggcactcctctcctcaaaaaaatttaaaaaaaaagccacacccacacacgcactccattttgtcaatcatttcaggggtcaaagtcactagggttgagcttttctggtgtagcccctcatcgccaagttccaaggaggctcactggggctcagattggaagacattttcaccaagttgccctgagaaggtctgagatgagtgaggtgtgcctgaattcttacatgggggcctgcagggactaatgggaagggttgatcttatcacccccatcctggaaaattagagaaggctctttcacaaacctgggctaaagaaatttcttttgccgggcacggtggctcaagcctgtaatcccagcactttgggaggctgaggcgggtggatcacctgaggtcaggagtttgaggccagcctgaccaacacggagaaaccccgtctctataaaaatacaaaattagctaggagtggtagtgcatgcctctaatcccaggtacttgggaggctaaggaaggagaatcacttgaacccgggagacggaggttgcagtgagccgagatcgtgccactgcactcaagcctgggggacaagagcgaaactccgtctccaaaaaaaaaaaagaaaagaaaaaaaagaaacaaacttcttttgcaaggttctgaggccattgactcctgacagtttgttcttccttacaagaaaatcacagtaacatttataaaatgcagagttgtgaacacatagctattgaccttggaaacagggaaagaaggtcaggtgtacaactaagacataagcaaattgtttcaatcaagaatacatgagtggtcaggcacggtggctcacgcctgtaatcccagcactttgggaggtcgaggtgggcagatcaccagaagtcagtagtttgagaccagcctggccaacacagtgagagcctgtctctactgacaatgcaaaaacctagccaggagtggtggagggcacctgtaatcccaactacttggtaggctgaggcaggagaatcacttgaacccaggaggcagacgttgtagtgacaccagatcgcaccattgcagtccagcctgggcaacaagagcaaaactccatctcaaaaaaaaacccccaaaaaaacaaaaagaaaaacaaaaaaaaaaccgaggctgggagcagtggctcacacctgtaatctcatcacattgggaggccaagtcgggtggatcacaaggtcaggatttgagaccagcctgacaaacgtgatgaaaccccgtctctactaaaaatacaaaaattagccaggcatgctggtgggtgcctgtaattccagctactcaggagactgaggcaggagcatcacttgatcccaggaggcagaggttgcagtgagctgagattgcaccactgccctccatccaaggcgacagagcaagattccatttcaaaaaagaaaagaaaagaatacacgggtgcttttggaggagcgttctatgccaatccagcccatgtttcaacatttttccagaatggaccagagggccttgagggaaacacgcaataaatagctcccagatcaagattttaacaaaggacataaggaaagaaaactgaaaaacagactaactggttaaagtacattttgatgtttagttaaaaggccactgacatatttaccaagtacacactgaaacaatcaaacttaagtttaggtaccaaaggttttcaataaataacaaagactagaaagcatgcagacattgatatgaactggatgcaactaatttaaaacagcaactattttgaaattgttttttaaaaaaatctaacgaattctggggtcaaccggaaaataactggaaaatatacaagtacagaaacgaatgatgtgagctgattataggatgctgcaaaggcatctttcagaagtcattatgtattaagaaatacaacttttataacttagatttatctcaaactcaaactgcaaaataaataaataaataaataaaaaataaagagagaaatgaagaggaaccagaaagaaaaagaaggaagtccattatacgagaagaaaagcatttttgaggtctttttttgttattttttgtttgtttgagatggagactcactctgccacccaggctgcagtatagtggcacaattttggttcactgcaacttctacctcctaggtttaagcaattctcatgccccagcctcccaagtagctggaactaaaggtgcacaccaacacccccggctaacttttgtatttttagtagagatggggtttcaccatgttagggtgcttttgaaattgtgaccttaggtgaccagttcacatgggtcgaccaaagtactctgattgcagggatgagccaccacgtaccgaggctttgatatccttttttttttttttttttttgagatagactctcactctgtcgcccaggctggagcccagtggtgcgatctcgactccctgcaagctccgcctcacaggttcatgccattctcctgcctcagcatctggagtagctgggactacaggcgccagccaccatgcccagctaattttttgtatttttagtagagacagggattcaccctgttagccaggaaagtctcgatctcctgaccccgtgatctgcctgcctcggcctcccaaagtgctgggattataggcatgagcctccgtgcctggcctcatatcccttttaaaaattactatgatatatccctttcaaaaagtactaactgaaaaaagtactatctctttaaaaagtactggctcaaaaaaataatagaaaataagaaacaaaaaacaggctgagaaaagtggctcacatctgttggccatgctggtttcaaactcctgacctcaagtgacctatgtgccttggcctcccgacgtgctgggattacaggtcggagccaccacacctggccccatcctcttaacataaacacttgaatgtcaataaaggcttgaactcaatgttaagtcaacacaaactcaagtcaatgctgaattgactccaatgtcaattaatgcttgatggtttgctatactcatttcattgggaacggttatctcaaaaatgaattttctgatgttctgcatggagtgatcttggactgaagaccttgccacactgatgacatttgtaagatttctgtccagtatagattctctgatgtctaatgacgtgtgaacgtgaagcaaaggctttgccacaatcatcacacttgtgaggtttctctcctgtataaattctcctatgttttgcataggatgaagcttgactgaagaccttggcacagtcatgacatttgtaaggtttctctccagtatgagttcaccgatgacctgcaatatgtgaacgatctctgaaaaatttgccacatttattacacttgtaagatctctcttcattatggattctccaatgatttgtaatcgttgtagcattactgaagactttgtgacaatcattacattagtcaagtttccctacaccatgaattgcctgatggtgaataagtgttgactgcttgccaaaggctttgccacactcattacacttgtaaggtttctctccagtgtgaagtccagtatgttgttccaggtgtgaatcactcccaagtcttgtcagaaaccttacatttgtaagctttctctccagtataaattctcctatgtctttaaggtgtgatttccaaatggaaactttgtcacatgcttcacatttctaaggtttctctccagtatgaattctatgatgacgtgaaaggtgtgattgttgattaaaagccttcccacattcattacacttgtaaggtttctctgcagtgtgaattctggtatgtcttgacaggagtgaattacgcacgaaagccttgtcacaaattgtacatttgtaagatttctctccagtatgaagtctacgatggtatataagggatgagcagtgacggaaggtattgccacactcattacacttgtaaggtttctcaccactatgaagtctacgatggcaatgaagggatgacctgcgactgaaggtcttgctgcactcattacacttgtaaggtttctcaccactatgaactctatgatggcatacaaggtatgacctgtgactgaaggtcttgctgcactcattacacttgtaaggtttctctccactatgaattctagtatgttttgccagataggaatgacacgcaaaagccttgtcacaaaccttacatttgtatggtttctctccagtatgacctatcttatgtgtctcaaggcttgatttacgactgaaaaccttttcacattcatcacatttgtaaggttgctccccagtatgaattgacttatgaattaaaagatctgaattttgaccaaaggtcttcccacattcattacacttgtaaggtttttctccacagtcaattctagtatgttttgccagttgtgaactccacacaaaagccttgtcacaaaccttacatttgtaagatttctctccaccatgaagtctatgatggcatacaagggatgacttgtgactgaaggtcttgccacactcattacatttataagttttctttgcagtatgaattcttctatgtcgagccagctgtgaatgccacgtgaaagctgtgtcacaaaccttacatctgtatggtttctctccagtatgaattctcttatgtgtctcaatggttgatttccgactgaaaactttgtcacattcttcacatttgtaaggtttctctccagtatgaattctatgatgtgaaagttgtgattgttgattaaaagccttgtcacattcattacacttgtaaggattttctccagtatcaattgccttatcaattagaagggctgaattttgaccaaagatcttgccacactcattacaattgtaacgttttactccagtatgaagtctacgatggcaggtaagggatgactcctgactgaaggtcttgccacactctttacacttgtaaggtttctcaacagtgtgacatctatcatggcatgcaaggtattgctcgtgattaaagagcttgccacatacatcacatttatattgtttgtctcctaaatggggtatctggtgtttccttaagagtgagctacaattaaaggctttgccactcttattacattggaaagatttttctctcatgtgtacttcctgtttttgtgggagtaatgaagaattcaggggattattcccatagttattagaaatctgggtttggggcctacaggaaattctttggaatgttgaaactgagggagcatcattagtagacttctcaagttgattaccaatttcacctttgatctgaaatatgtggagttcaggcagatgtgaataaaagcttgatccaagctgatctttaataggcttgtttccagcatgcctgtgatcatgttggtctgtgctaccagtcaacttttttatttttgtcatgggtgcttcaaggccatttctttcatcttcttgacactgaaactcaatgtcatgaatttctttctcaatttcctggaagcaaaaatctccaatgtgatgactttcatgtctttgcaatgtccctgtgtggatcacttctgtattgccttgccctgttgacaagacctccttcatcatgcatttggaagagatatctacaaaatataaacaccaatacatttccaattaagtacagatggtaaatcacactgaagtgcataaatatgacacaaaaaacgatacttattttgaacttcccaaacatcatcttcaaagtttaggaaaacgaaaggagcaatattctttagtaaataaagggtgattacatgtccttcaagacaattctatgaaagcctatttcctatgtcatgacaaaacactgacagggcacaaacatgtgtaagcctaaagtaaggagtatttttccactgtgaccctgaactgtatcacaatttgcaaaaagcatatcaccatcacatcggtgaagagaaaaatatatactcttcatatttaaagcatatttactctatacaaataaatgctaaaaaaaaaaaaaaaactccccacacaacatactatattggtaaataatccacaacaagctcatgtaaggataaccaaaagcaatggaaattccgtattgtcaaacaattatagcactgagaagataagaaaagattacaaaaattagccaggtatggtggcccatgcctgtagtcacagctattcaggaggctgaagcacaagaatcacttaaacctgggaggtagaggttgcagtgagccaggatcacaccactgcactccagcctgggtgacaaagtgagactctacctaaaaaaaaaaaaaaaaagttaatagaatatttttctgaataaatgtcataaaattacctataagaacaggcactttgtgacttttcaaaaattttttgtatttttatttttttgagatggagtcttgcactccagcttggagtgccatggtgccatctcagctcactgcagcctctgcctcctgggttgaagtgattctcctgcctcagcttccagagtagcttggactacaggcatgcaccactatgcctggctaatttttgtgtttttagtaaagatggggaccatattggccaggctggtctcaaactcctgacctcaagtaatccacccacctcggcctcccaaagttctgggattacaggtgtgagccactgcacctggtggcactttgtgacattaacgaatagtgcatgtcagttatattgcataccacataccgaaaagccatatgcaaaattataaaaattaattaataaaatattgtaacccaagataaaaccagcaagcaaataagtacatttatacagcctgcagaattctaaacaactccctcttaagaaaaaagccacaacttctactcaaccaccagcacacaatataagaactgaaatacatgttaagatcactaccttctgatgtatgaggccaagaaaatacacagcattaggccaggcgccttggctcaagcctgtaatcccaccactttgggaggccgagtcagacggatcacgaggtcaggagattgagaccatcctggctaacacagtgaaaccccgtctctactaaaaaaatacaaaaacattagctgggcatgatggctggtgcctgtagtccaagctactctggaagctgaggcaggagaatggcatgaacctggaagatggagactgcagtgagcccagatcgcgccactgcactctagcctgggtgacagagcgagactctgtctcaaaaatgaaataaaataaagaaaatacacagcatcttaagaaataagaattggctaatggctgggcacggtggctcacacgtgtaatcccagtactttggcaggccaaggcatgtggatcatgaggtcaggagttcaagaacagcctgaccaacatggggaaaccccatcctacgaagaatacaaaaaaatcagctgggcctggtggagggcgcctataatctcagctactttggaggctgaggcaaaagaatcatttgaactcaggaggtggagggtgcagtgagctgagatcgcaccattgcactccagcctgggtgacagggcaagactccgtctcaaaaaaaaataaacaaaggaagaaagaattgactaatagtatagaaaagtgtaattatgatgtcacaactacacttatgtaacagccaggcaatacagcaattttatatatatgcattccccatagttatctagttcactatgcataaaatataaaacatagaatgtgtactaggaaaatttattaactgagatcagagaaaacattgtataaaacaaattgcacaataagaacaaaaaatatgatgtatgttccctggcccgaatgttcgcattggctaaaagccactatcagatttcttattccccaataggatgttcctgcagttggggtcttttagagagttttgtaatgggtgttgactaattatgaatagcactagggcttttaattgtattttttctttctttttttctttctctctttactatttatttttatttatttattttttgagagggagtatcactgtgtagcccagcctggagtgcggtggtgcaatcttggctcactgcaacctctgcctcccgggttcaagcgattctcctgcctcagccttcagagtagctaggactacaggcatgcaccaccatgcccagataatttttatatttttagtagagaaggggtttcaccatgttggccaggatggtctcaatcttttgacctcatgatccgccctcctcgcctcccaaagtgctgggattacaggcgtgagccaccatgcccggactctttatttatttttgagacagaatttcgctcttgttgcccaggctggagtgcaatagcgtgatctaggatcaccacaaccaccgcctcgcaggttcaagcgattctcctgcctcagccacccgagtagctgggattacaggcatgtgccaccactcccggctaattttgtagttttagtagagatgtggtttctccatgttggtcaggctggtctcaaactcccggcctcatgtgatttggctgtctcagcctcccaaagtgctgggattgcaggcgtgagccaccatgcccggcaaagactagtgcttttataaaaagagacagtaaagagctcattgcctgctcctctttacaccacatcaggacacggcaggaagacggctgggctaaaccatgaagaaggctctcaccaggagccaatctagctgacatcttgttcttggatttcccactttccagattcatgagcaacaaatttctatgtcttaagctttccagtttcagctatttctttttttgtctgtttttgagactgagtaatgcttcatcacccaggctggagtgcagtggcacgattctcctacctaaagagattctcatgcctcagcctcttgagtagcagggagtacagacacatgccaccatgcctggctaattttttttttttttttttttgggaaacagaatctaactctgtcacccgggatggagtaagtggtgcaatcatggctcactgcaacatccaactccaaggttcaagtgattctcatgtctcagcctcacgagaagctgggattacaggttcataccaacacacccagctaacttttgtatttttactagagatggggtttcaccatgttggccaggctggtctagaacttctgacctcaagtgatccacccgtctcggcctcccaaaatattgggataataggtgtgagacatcatgcccgtccaatgttttttaatttagtaggttcaagttttcattatgtttgcccgactggtctcaaactcctgacctcaagccatctacccacctcagcctttcaaagtgctggaattagaggccaaagccactgcggctggccagtctaagctatttctaacaggacagtgaaaagagtgagacaggaaagggggcatctcatcatcaacattactgagggctgacaaatattattaaacaaaggaagttgagtgtgtactataaaacttatatgaagccatctaatagtactcatttgttttaaaaagcaggtggatgaatcactagtagaaactccatctctgctaaaaatacagaaattagccaggctcgcaccaggcataatcccagctacttgggggattatgtcctgaggcaggacaatcacttgaacccaagaagtggaggttgcagtgagccgagactgcaccactgcagtccagcctgggcaacaagagggaaactccatttaaaaaaaaaaaaaaaaaggccaggcacagtggctcatgcctgtaatcccagtactttcggaggctgaggcaggtagatcacttgaggtcaggagttcgagaccagcctggccaacatggtgaaacccccatctctactaaaaatacaaaacttgccaggcgtggtggcacttgcctgtaatcccagcttctcgggaggctgaggcaggagaaccatttgaatccgggaggtggaggttgcggtgaactcagattgtgccattgcacttcagcctgggaaacaggagcaaaactctttctcaaacaaaacaaaactaaacaaaaaacaaaaaaaaaaaccaaccctggaggcaaattaacattatttctcaaataatgacagcaggcccacagtgttcatgtacatgaccccagtttgcacgtacggtaagtgagggacaagacttgatcctgggcatgaaggatcccacgacatgttcttaggcacaatagtcagcgcaggcaggacaggaaatgaccagacacagaaaatatgaggagaacagaaagaagtacatcaagggggatacaaggactgagctgggacacaagcgctgagctgcgctgctgacagtggttctgaagccatccctcatggatcatgtgctgagtcatgatgtcctgcacacactgatttaagcggcctcctataattttgtccagtggatgaacaaggtcttcacttactcagggagagtagtgttggaggggaggggctcacggggaaattggggtgttcacttttacaaagtcaataggctggtatttgcatccagatcaatgtatcatgtgagtcaaggccaggaaaggaagggcaagggtggacggcaggaagtaatgggcatgtaggagtgaactttgtgcatgcacctctgtgggaatataattccaccaagatagaccaaatcttgagcttagaggaaagtggaactaatttagcaaatggtaacatattgacccaaggttaaatatgcaaattacaatatgggcaagggacaagaatgaaagagatccaacaatgcagcagtacggtggcctgaggtgaaagcagttttacatctcttaaattgaatgcctctgacttctagtttcaggcatgtactcaacaaaatcctctgtgtagattccagaaatgcatacaaacacacacacaaaaaaacaactaaactccatgaagagtacagtagagcaatgtaggagaccatgggggtgaacaaggatcccctggctgagtaggtagagatgtgtttgtgaaaacagagccaggctgagtgcagtggcttacttctgtaatcccagctcattaggaagacgggtgggtggatcatgttgtcaggagttcaagactagcctggccagcatgcatggtgaaacactgtctctactaaaaaaaaaaaaaaaaaaaaaaaaaaaaaaacattggccgggcatggtgatgcacatctatgaccccagctacttaggaggctgaggtagcagattgcttgaacccaggaggcagaggttgcagtaagctgagattgcaccactgcactccagcatgggtgacagagcaatactccgtctgaaaaaaaaaaaaagaaagaaactgtacctttaatagacatatggttttgccacattgtctaggctggtctcgaattcctgacctcaggtgattcacccacgcacttccaaagtgctgggattactggcatgtgcgacttcacccagctgacattatttattatagtaaagagaagaaaccaacccagatgtccattgacagataaatatacgaacaaaatgtggtacacacatacagtggaatattattcagccttaaaaacaaactcggaaggggccaggggctgtggctcatgcctgtaatcccagcactttgggaatccaaggcaactgaatcacgtcaggccaggctatcaaaatcagcctggccaacatggcaaaactgccatctgtaatagaactaccaaaaattagtcgggtgtggtgacacatgcctgtaatcccagccactcaagaggctgaggcaggagagtcgcttgaacccaaaaggaggaggttgcagtgagccaagatcatgccactgcactcaagcctgggcaacagagtgagactctgactcaaaacaaacaaacaaaaaaacaacaacatagaaatgaacaagttgaaagccactgtgtcttaaggaaatgacagtagaactaaacaatggaaacctcattcaacctcaaaagcttcctcaataagattgatgaaaaccatatctcttacagggttgatcctacaacaaactgaacataggttttcttgttaaaaatgaacagtgacacatattggtgtgaaaaatgtgacatgaacaagagttcagtcaagagcctcatacatatgaggctgtgagcccgaatgatgtcctcgctgggaggaattgcaacaccactgactgctgcttagagaagatgatcattagtttatgggatgaacattgtcacagtgccagtgagagacgcttctgtgatgctcctcaaaaaccagaatgagctgggcatggtggctcacgcctgtaatcccagcactttgggaggccgaggtgggtggatcacctgaggtcgggagttagagacgagcctgaccaacatggagaaaccccatctctactaaaaatacaaaattagctgggtgtggtctcgcatgcctataataacagctactcaggaggctgaggcaggagaatcacttgatcctgaggggcggaggttatggtgagccaagatcataccattgcactccagcctcggcaataggagcgaaacaccatctcaaaaacaaaaaacaaaaaacaaaacccatgtatggggcaaaatcacaaaagaggatacaaagccaggatgagccaagatagacaagagcagactcctcatgtctgcagggacattttcctcacccacagcctccaggttcctgtagttctccaacatcacttccctgtacaaagccctctgtgaagggttcaggcatttccactctgccaatgagaattctatagccacatcccggaaagtcaagcgtccctaaaatgaaacacacatttcaacaaaacattatggagtaatgagttatcaccttcacagaaaatgagaaatgagaaaataagtatttatttgatcaaagattatgttctgacaaaaggatgttaaggtatttttgaatattttttccctatagttgcgttttattgtagttttccttgaaagattttaagatcccataagtcactacggaaatctcgattttatggacaatataaaaactataaaaataaaaaggaaaaacagggccaggcatggcagttcacgcttgtaatcccaacacttcaggaggccaaggcgggcagattatttgcggtcaagagttcgagaccagcctggccaatgtggtgaaaaactgtctctcctaaaaatataaaaattagccgggcatggtagaaggcacctgtaatcccagctacacaggaggctgaggcaggagaatcacttgaacccgggagatggaggctgcagtgagccaagttcgcaccactgccctccatcctgggcaacagactgacactccatctcaaaaaacaaaacaaaacaaaacaaaaaaacaatgccgggcagtgactgtcacctgtaatcccagcactttgggagaccaagacgggcagataatgtggtcaagagattgagaccatcctggtcaacatggcaaaaccatgtctctactaaaaatacaaatattagctgggtgttgtggtgcaggcctgtactcccagatactcaagaggctgaggcaggaggatcgcttgaatccgggaggcggaggttgcagtgagccaagatcgcaccactgcactttagcctggcaacagagcaagactccatctcacacacacaaaaacaaaacaaaacaaaacaaaaaaacaaatacagggttttctctatagacatgccagatattatgttcaacataccgggtgatattaagtctctagatgagctaagatacatgtggtgcttcagagaggacaaagtccaatggctttcaaagaaaagtccaaatctaaaaactggcacagtggctcatgcctgtaatcccagcactttgggaggctgaggtgggcggatcacaaggtcaggagttcgagaccagcctgggaacatgctgaaaccccttctctactaaaagtacaaaaattagctgggcgtggtggtaggtgcctgtaatccccaatactggggaggctgaggctggagaattgcttgaaaccaggaggcagaggttgcagtgagctgataccatgccggatacaaaatctctctccttattattctccttttccagaattaaccacacatctgtgcacattaacatatgtatttcatatgtagtttctctgagctgacatccagatgtggcccgtgaacaacccaggctgcccagcagcactgacatcaacgggctcacaccccatgtttatccatgtcagggtgtgagcccttcccaggaccatgcccagtggagcctcttcccaagttcatgtcactgggtcacaggagatggaatctcagagcagctgagaggaactgagggcaggcatgggtgagtgcgagtgaacgtgtcagacaagatgcttcagactcagaaaagactggctgctacaatacctggcatttcagaaacgaaagacacagattaatccacagaggaatatcacttcacctgaggaagagccatgcctggctcctttcctttcctcttctgagctgcttcctcacgtaacatgagtctttaggaatcaatcctgtatgtgaaaaaaaatgagacttcatgttagaaatgactcactcccttcctgtgacaaaaacacacgaacgggggagacgtcaccctgtagaaagaagtcccccactgcccactgcaccagagatcatgcagagataaggaagtcccacaggaagacctatgagtgtatatttgaccccagtcttcagatctcacctctctcctggagaagccaccacacacgaggcagcagtggggagctgggctggactgatctccccttcagggcacagactcatccttcatcaattgccatccagaggacagcccctcacctctctgtggatcacaggctgaggtcagccctcagaaatgcaggactcagagcttccatgctcaatgctgcacacagatgacaagcacctgggccactgcaggtattactgagggtgggttccatcccgtcagaataagaatccctgctaaagtggcacaaaagctctatttgcaaaatgcctcgactctaacgtgaagccagggttgagctccactcagagggggcgagcccagcacagccccatgttctggctctgccctccccttggggccttgttctcaccaggatccagacagtggatgacaaaggcacaaaaataatcacacagaacaggcaatgtggagaaggggtagggtgagggttgggctgtgtgtaaggaaaataaatcttggggccccaaatcactaagcaaaagggaaaagtcaagctgggaactgcaagggaaccagactccccttctattcaaagtcatccctctgctccctgacacagatgcatatctgagtgcctccttcaaaagactaattagaaactcaaaagaaggacccagcacagtggctcaggactgtaatcccagcactgtgggaggccaaggcagtcagaccacttggggtgaagaggtagggactagcccagccaacatggtgaaaccacatctctactaaaaatacaaaactgatccgggcatctacttgggaagctgaggcaggagaatcacttgaacccaggaggcagaggttgcagtgagccgagattgtgccactgcactccagcctgggggacaaaacgagacttcatctcaaaaaaaaaaaaggaaactcaaaagactgcaaccatttgtgcctcagttctctgtgaactaaaagccccttccctgcttcaagtcttcctgcctttatttaaagttgtcccactttcccagaccaaaccaacgtacttcttacatatgttgatgtctcatgtctccataaaatgtataaaattaagctctgccccgactatcttgggcaaaataaactttctaaattaactcagatctgtgtaagattttctggttttacagtggcaatgtcaaatgggagatcacaaaggaaacccggagaagatgataccagaacaaggacctagaaaagaaaggctgcttgtcacttgcagctgaggggaagagagtcctaggcagagggacagctcaagtgaaggccctgagacaggagcaacctcagccccaggaataggaaagcagcctgtgtggctggaacagtggaagagaggagggcacaagtaggagatgaggagaaaaatgttcaaaatatacacaactgtgcacacacagcaataggtgtttaaaacactgaaaaagaggcagctgtagaaatgggatctgagcaaatgcttttctcatgaacacatgggctctgctaaaccaaggttccaagtcaatccagcccatccttcaacatctgtagagaatattatggaccagagggaattgagggagacacttacttagaagctcacagatcaccattttttcagatgatatgaggaaagaaaatggaataggctacttgaactaaattttcatgttagggtaaggaaaaaaggtccttgatatctttatcaagtacacactgaaacaacctaaaattatatatcacgtagtagaaaacgttttcgatatatgataaagactagaaagcacacagacctcaatgtaaactgaacacaatctcatagagaaacaattttaaaatggttaaaaaatatagatctaatgaaatcttgggtcaaaggagaaatatttgaaaatataccatactttgaaaacaatgaggccaggcatggtgacacgcctataatcccagcactttgggaggccagggcatgatcacaaggttaggagttcgagaccagcctggccaacatggagaaaccatgtctctactaaaaatacaaaaattagcaggaaatggttgtgcacacctgtcgccccagctactctggaggctgaggcaggagaatcccttaaccccaggagatgaaggttgcagtgagacgagatcatgccactgcacaccagcctgggtgacagagtctcaataaataaaaatatatatctaaacattagccaggcctggtggggcgtgcctgtggtcccagggaatccagaggctgaggtgggaaaatcacttgagcccaggaggttgccgctgcactgagctgtgatcctgccactgcactccagcctggacagcagtaagagtgtctcaaaaaaacagaaattaaaggcccggcagctgctcatgcctgtaatcccagcaccttgggaggctgaggtgggaggatcacctgaggtcaggaattcaagaccagcctgaccaagatggagaaaccccatctctactaaaaatacaaaattagccggccatggtggtgcgtgcctctaatcataactactcaggaggctgaggcaggagaatcacttgaactccagaggcgaactttgcagtgaaccaagatcatgccattgcactacagcctgggcaacaagagcaaaactcagtcaaaaaacaaacaaacaaacaaaaaacaaaaaacccgacaacaacaaaaataagtaaattaaaagtaaacttaaaaaatgaaaagcaactaatgaggcaaagcatggtggctcacacctgtaatcccagcactttgggaggccaaggcgggtggatcacggggtcatgagttcaagagcagtctggccaagatggtgaacctctgtctctgctaaaaataaaaagtcagacaggtgtggtggcagctgcctataatcccagctgcttgggaggctgaggcagagcattgcttgaacccgggaggtggaggttgcagtgagtcaagatcactccactgcactccagcttgcctgacagagaaagactccatctcaaaaagaaaaaataaatgaataaaaacacacaaaaaaaccaaccacatgaatgaaatgaagaggaactagaaaaaaggaaaccaattacaaaaagagaacaaaagcacttttaatactcctttcatcacgttccatatagtaacagagactcagtcacttcttaccctacttctctcccccactccccaccccagccatgaaaagggaagagggtgatccacaactaacgagtcaagtcactgtcctctggctgaagaggggttgcagagggaagctgcctctgatgccatcattataaaatgcaccacacttagacacaggagtttggcaactctcattctcatctgtataatttaaactaattttaaatttgttaccttataaacagagaaagcaacatgtcatcacttcatcatcacatccaatcaactcaccgctcatctgcacccagggtcccccttcatcttcattactgttccatcattctatacatagctctttctcaccttctctctccatctgtttcttttctgcatttccccctggacttctgctcattttatgcccctctcctgttttgcttcattcttttttgttttgttttgttttttagtatttattgatcattcttgggtgtttctcagagagggggatgtggcagggtcatacgacaatagtggagagaaggtcagcagataaacacgtgaatgaaggtctctggttttcctaggcagaggtccctgcggccttccgcagtgtttgtctccctgggtacttgagattagggagtggtgatgacttttaaggagcatgctgcctttaagcatctgtttaacaaagcacatcttgcaccgcccttaatccatttatttaaccctgagttgacacagcacgtttcagagagcacggggttgggggtagggttacacattaacagcatctcaaggcagaagaatttttcttagtacagaacaaaatagagtctcctatgtctacttctttctacacagacacagtaacaatctgatctctcttgcttttctccacatttcccccttttcttttcgacaaaaccgccatcgtcatcatggccagttctcaataagctgttgggtacacctgcagaaaggctgtcacttcacacttggaagattgcacagcggccaggcagaggcgccccccacctccccgacggggcggccgggcagaggcgctccccacttcccagatggggcggccgggcagaggcactcctcacttcccagaaggggcggttgctggacagaggcgctcctcacctcccagatggggcggccgggcagaggcgctcctcacctcccagatggggcggccgggcagaggcgctcctcacctcccagatggggcagccgggcagaggcgctcctcacttcccagacggggcagctgctgggcagaggcgctcctcacctcccagacggggcagccgggcagaggtgctcctcacatctcagacggggcggctgctgggcagaggcgctccccacctcccagatggcgtggccgggcagaggcactcctcacatcccagacggggtggccaggcagaggtgctccccacttccccgatggggtggcggctgggcagaggtgctcctcacttcccagatggggcggccgggcagagatgctcctcacttctcagatggggtggctgggcagaggcgttcctcacctcccagacagggtcgcagtcaggcagaggcgctcctcacatcccagacggggcggccgggcagaggcactcctcacttcccagacggggaggccaggcagcggtgctcctcacttcccagacggggcggccaggcagaggcgctcctcacttcccagacagggcagccgagcagaggggctcctcacttcctagacggggcggccaggaagagacgctcctcacttcccaaacggggtggtggctgggcagaggcgctcctcacttcctagatgggatggcggccgtgcagaggtgctcctcatttcccagactgggcagccgggcagagaggctcctcacatctcagacaatgggtggccaggcagagacgctcctcacttcctagatggggtggtggccgggcagaggctataatctcagcactttgggaggccaaggcaggcggctgggaggtggaggttgtagcaagccaagatcacgccactgcactctagcctgggcaacattgagcactgagtgagcaagactccgtctgcaatcccggcacctcgggaggccaaggcgggcaaatcactggaggtcaggggttggagaccagcccggccaacatggcgaaaccccgtctccaccaaaaatacaaaaaccagtcaggcttggtggcttgtgactgcaatcccaggcactcagcaggctgaggcaggagaatcaggcagggaggttgcagcgagcccagatcacggcagtactgtccagcctcggcaacagagggagaccgtggaaagtgagaggggaaagggagagagggagggagagggagaggcagaggcagagggagagggagagggaaagggagagggagagagagagggagagggagagcttttttttgttttttgagatggagtttcgctcttgttgcccacactgaagtgcaatgatgcgatctcagctcaccacaacctctgcctcctgggttcaagtgactctcctgcctcagcctcctaatccaaaattatcagggcacggtggcccatgcctgtaatcccagctactcagggggtagtatcgcaggagaatcgcttcaaccctaaaggcagagatactcattagccaagattgtgccattgcactccagcctgggcaacaagagcaaaactccactgcaaaataataataataataattagtatgtaggccaggtgcggtggctcatccctataatcccagtacattgcaaggccaagacaggaggaacctttgagcccaggattttcagtccagcctgggaaacatactgaaaccgtttctacaaaaaaaataaaataaaataaaaaataaataaataactagccgggcttggtgtctcacacctgtggtctcagctactcaggagactgagggaggaggatcacttgagcctaagaggtcgaggctgcagttagagtagataacgccattgtactccagcctgggcaatagggccagaccctgtctcaaaatattaattaattaattaattaattaaaagtattatgtaataacagaaagttgtttttttctttttccccacatcactgccccactttctaccccaccctgggaaaagggaagaaactgactcacaactgagtaagtcactgccctcgggctgaatagggattccaagtggaagctaacctctgacaccaagatttatagaatgtacatgactcacataggaattttaaaattctcaaactcatctgtataatttaaacaagttattagattatatacacagaagtcaacatgtcacaactaatcatatccaatgaactcacacactcatctgtatccaaagtcccccaccctttttttcttttaaaacagggtcttgctcttttcaccaggctggagtacagtggcatgatctctgctcacagcagcctggacctcctgggctcaagtgatcctccagcctctgcctacagagtagctgaaattacaggtgcacattatcatgcctggtttttgttttcgtttttttttttttttttttgatagagatgggggcaatgactattttgcccaggctggtcttgaactcctggattcaagcaatctctctgtcccagtctcctaaagtgctgggattacaggcatgagccactgcgcctggcccctctttcttcattactgtgcttccctccctaattctgtgcatatctctcattctccccttctctttctagctcttgttttcttttctttttccctgggattgtgctccttattttgtacctctctcctctcctgcaatttatccccttcttccctctattgcttctcttccacctcttctgctccatcctcacaacttatttaaccttttttttttttttttttttgagacggagtttccatcttgttgcccaggctggagtgcaatggtgcgatcttggctcactgcaacctccgcctcccaggttcaagcaattctccttcctcagacttcctagtagctggcattacaggcatgtgcaaccgtgcctgccttattttgtatttttagtagagacggggtttctccatgttggtcaggctgctctcaaactctggacctcaggtgatccgcccacctcagcctcccaaagtgctgggattataggcatgagccacagcgtctggtccttattgaagggggccagcccctccacacctgtgagtatttctcatcaggtgagatgagagactgagaaaagaaataagacagagacaacgtatagagaaagaacagtgggctcagaggaccagcactcagcatacggaggatccgcaccagccgaggtctctgagttccctcaatatttattgatcactatctctaccatctcagagagggggatgtggaaggactgtagggtaatggtggggagaaggtcagcaggaaatcatgtaagcaaagctctctgtgtcataaataagtttaaggaaagatgctgtacctcgatgtgcatgtagggtagatttatgtttgactttacacaaacatctcagtgcagtaaacagcagtattgccaccagcatgtctcacctacagccataaggcagttttctcctatctctgtaaacagaacatacgattgggttttacaccaagatattccattcccagggaggagcaggagacagaggccttcctcttatctcaactgcaaagagggctatctctttcactaaccgtcctcagcacagaccctttacgggtgtctggctgggggatggtcaggtctttcccttcccacgaggccatatctcaggctgtctcagtggagagaaaccttggacaatacccaggctttcttgggcagaggtccctgcggccttccacagtgtattctgtcccagggtactcgagactggagaatggcgatgacttttaccaagcatactgcctgcaaacacattttaacaaagcacagcctgcacagccctaaatccattaaaccttgggtcaacacagcacatgtttctgtgagcacagggttgcggctagggttacagattaacagcatctcaaagcagactaatttctcttagtacagaccaaaatggggtttcttatgtctacttctttctacatagacacagtaacagtctgatctctcttttttttccccaaaccttatttaacctcttgttgctccttctccccaatctttcaatcgtcctcaatctctatatattaccgcctcttctcttatctctccatctcctctgctctccctgttaaattctctcttccctgttacagcccccagtccccactctctagcaccccagatccccaggtgtcctccctgctgtggttctccctctggtctccgtgccaccagcaccactctgctctgtctgccctggctccaaatccctcctcctctccctcactctggtgagcctccctctttgctgcccctctccctatcttgtccttcatctctgtacatctagctcttctctacatttctccagttgcttttctcctcctgctttcttattttttctttcacttttgctgtctcttggcaaatttctcacccatcctctactttgccatctgttacgggcctttctcattcttcttttctctgtctctggttttctactgctctctcagtccctctctctatctcctcatctctttgacccaaacaatcacacgcgggtttggagtaagaggcctacatcctggagaagcgcattttccaggaggtggagctgggcaggcaagaacacccggtgtcataggacaaggccctgggacctccccaacgctggctcaggggaagcggtgactgcggagggaagacttggggagcagcagggcccggcacgaggagggacatagtgggagacggcgccttaagacatgggtggcacctgcaggctcccaggaccaggcagaggacccagcctccccaggactggggccccggcgctgcgctccaggggaggccgacgggggctgggaggcgcccagggcgggaatccagcgcacgggtgaggactttaaaaagcaaggggcaggatgagtcaacaaggttttgagcaggaaaactatgcgataggaagtgtatacattgccctatagcagaaagaccggggacgggaccagcctccaagcgacttcaaacccaaaaggaagcaacttccagactcttatgggcgtctcaatttgctctgggtgaaggaagacaggcaagaatttccaggtctgtgaggaccccacgtcccagggacagaagtgccagggacctgggaagtgcagacttaatacaaggcagagcaaaactcacgcgcctcggtaggacctttactccacgtgatccacttccgggtttgctgcgcaggacagaagccagtcccgggtggggcccccgaacatggtggcggggcctgggtgggacagaggcggggcgcgaggcggagagaccttgccctttagaacaggcaaagggcggggccgggaccggacctgtgcatctctccgcctcgcacccagcgcctctgtttttcgggtgtttggaggtgagagcggccaggaaggctgaggcatgatacaaaagccctggaattatctggaacgggaatgcaaactagaatgtgaaatgcaaagccctgcctgggcggaacatacgatttcatgctgatggcccacagaacagaacagaactcctctccctttctattctccattcactcaggagggagagtccaccctgtgctcagcttcagagacttccctagagcctttgcttgggatgcgggactgggtgctcaggccagggaggagtgaggtcaccacctgctgcctaaacgcagcagggatgcgggcgtgaggccggaagcctgaggtcccagctactcaggaagcagcggcgggagaatcgctgaacctgggggtccaggccagcctgggcgacaaagtaacaccccctcccgcagtgctctcttcattgtctctctcgcgcgctctttttcttttctttcctttttatttatttttattttttgagacggagtcttgctctgtcacccaggctggagtgcagtggcatgattttggctcactgcaagctccacctcccgggttcacgccattctcctgcctgagagttgagtaactgggactacaggtgcccgccacgatgcccggctacttttttgtatttttagtagagaaggggtttcactgtgttagccaggatggtctcgatctcctgaccccgtgatccacctgcctcagcctcgcaaagtgctgggattacaggtgtgagccaccatgctcggccttgtgtttttttttttttttttctttttaaacaaaatttttcatggtgtgacacagggatccaacattattcttttcaatgtggatatccagttagttgtcccgcacgtttgtgaaagagatcaattactttctctttttttacttttttctttccttttacttttgagacagagtatttctctgtggcccgtgctggggtgcagttgtgagatcatggcccactgcagcctctgcctcctgggttgaagctattcgtctgcctcagcctttggagtagctggtattacaagcgcacatgaccatgcccagctaacttttgtatttttggtagagatggggtttcaccatgttggccaggctggtctagaactcctgacttcaagtgatccgcctgccttggcctcccaaagtgctgggattacactcgtgagtcactgtgcctggcccaggaaatattctttacttcactttttaaatgtgagaaaatataattgagaaacaaagagtcttgccccaaatgagaaatcatctccacgatgataatagagaaagaaagaataactattttattaataaataagctttagaccagaatgtgatgggaaataaaggcaaacagctaagaggttgaaaagagagaaagaaacgtcactgttactatacaacccatttagtacatgttttcaagataaacactaatcagtcctcagggaagaggacttgaaaagcccttggtcacacatagttcatcctggctctacttggtaatggaggtgaccatctctgtcagctaactagcttcatcccgaggcagggggagaaaccctaacactaaccctaacacaaaaattagctggacgtggtggcaggcgcctgtaatttttctgtatttttagtagagacagagtttcaccaagctggccaggctggtttcgaactcctgacctcaagtgatctgcccaccttggcatatcaatgtattgggattacaggcttgagccaccagggtcagccaggaaaaactcttagaagttgcacctgcattccgctagactctgcttgcatgaccacattcctctcaaggctcagaattatttacaggtccatagctttaaatttgaatcatttgatgtttgaattatttaatttcctactgagacacaggtactatctatcttgttgtgtgccttttttttttttttttttttgagacggagtctcgctttgttgcccaggctgcagtgcagtggtgcaatctcagctcactgcaacctctgcctcccaggttcaagcaattctgcctcagcctcctgagtagctgggactacaagcatgtgccaccacacccggctaatttttttgaatttttagtagagacaggttttcaccatgttggtcaggtggtcttgaactcctgacctcgggattggccaggcttggcctcccaaagtggtgggattacaggcgtgagccactgcacctggccgttgtttgcctgtcaaagtgagctcccaagttcttcagaaatacatccctgggccgggcgtggtgggtcacgcctgtaatcccaggactctggaaggccgaggctggaggatcatctgaaatcagaagttcaagaccagcctggccaacatggtgaaaccccatctctacaaaactataaaaatcagccaggcattacagcgggtgcctgtagtcccagctacttgggaggctgaggcaggagaatcacatgtacccgagagacagaaattgcagtgagccgagatcgcaccatttaactccagcctgggcaacaagagtgaaactccatgtccgagaaagaaaagaaaagagaaagaaagaatactaccctcagaaaacagaaaatgcatttgcaaattttctaaataaatctcctaagaaaagaaatgaaaggaaagaaaatctctttctttattttcaaaggaggaattaaacctctcatttacttccttgtctgtttgagatagggtgtagctcactcacccaagctggagtgtggtggcaaaaacagggctcactgcagccttcaactccctggctcaagtgatcctcccacctttttcatcaagcatttggaagagatatctacaaaatataaacaccaatacgtttccaattaagtccagacggtaaatcatactgaaatgtgtaaatatgacacaataaacaatacttactttaaacttcccaaacataatcttcaaagtttaggaacataaaaggagtaagattctttaataaataaagggagattacatgtccttcaaatcatttctatggaagcctatttccaataccatgacaaaacactgacagggcaccaacatgtgtaagcctaaagtaaggactgtttttccactgtgaccctaaagtgcatcacagtttgcaaaaaacatatcactgtcacattaatgaaaagtatatattcttcatatttacagaatatcttctgtatacaaataaatgctaaaggaccacaaaatatactatactggtaaataatccacaacaagctcatgtaagggtaaccaaaatcaatggaaatgctgtattgtcaaataatcatagcacaaagaagataagaaaagattacaaaattagccaggcatggtggcttgcgcctgcagtcccagctactcaggagactgaggcacaaggatcgcttgaacctgggagggaaaggttgcagggagccaagattgcgccactgcattccagcctgggtgacagagcgagactccatctcaaaaaaaaaaaaaaaaaaaaaaaaaagaaaagaaagaaaaagaaaacaatgttaatacaatatttttctgaatacctgtcataaaattacctataaccacacagaacaggcacttattgaaattaacaagtgcagtgtatcagttatattacatatcacatactgaaaagccatatgtgaaatcttaaatattagtcagtaaactattgtaacccatgataaaaccagcaagcaaataagtacatttatataggctgcagaattctaaacaattccctcttaagaaaaaagccacaacttttgcttatcaccagcacacaatataagaattgaaatacgtgttaagatcactatcttctgatgtatgagttcaagtaaatacacagcattataaggaataagaactgactaaccatgtcggagggtgcaattatgatgtcacaggtacagctgcatatcaccaggcaatacagcaattttgtatatatgcattgtccttcgttatctagtcaactgtgcaaaaaatatagaaagtgtactgggaaaatttatcaactgagatcacagaaaacattgtataaaacaaattgcacaataaaaccataaaaaacatgatgtaggccgggcgcggtggctcaagcctgtaatcccagcactttgggattccgaggcgggcggatgacgaggtcaggagatcgagaccatcctggctaacatggtgaaaccccatctctactaaaaatacaaaaattagccgggcatagtggcgggtgcctgtagtctcagctactcgggaggctgaggcaggagaatggcatgaacccgggaggtggaggttgcagtgagccgagattgcatcactgcactccagcctgggcgacagagccagactccgtctcaaaaaaaaaaaaaaaaaaaaaaaaaaaaaaaaacatgatgtaggctccttggtctgaaagattatattggccaaaagcgatgttcagagttgtgtccaataggatgttcctgcagatggggcctgtgagagaatttggtcatgggtgttgactacacatgaataggtctagtgcttttatttttattatttatttatttgtttactttttgagacggagtttccctcttgttgcccaggctggagtgcaatgtcacgatcttggctcaccgcaaactttgcctcctgggttcaagcaattctcctgcctcagcctcctgagtagctgggattacaggcatgcaccatcacacccagctaattttgtatttttagtagagacggggtttctctattttggtcaggctggtctcgaaccacctacctcaggtgattcacccgcatcagccttccaaagtgctgggattacaagtgtgagcccccgcacacagccaagactactgcttttataaagagagacattaaagagctgattgttatttctttttgtttgtttgttttttgagaccaagtcacgctctatcactcaggctggagtgtagtggcatgattctcctgcctcagcctcccaagtagatgggactacagatgcatgccaccacccctggctatttttttttgggggtgggggagacagagtctcactctgtcacccaggctggagtgccgtggtgcgatcgtggctcactgcaacctctgcctcccagctgggtccaaataattctcctgcctcagcctccagagtagctgaaattagaggcgtgtgccaccacgctcagctaatttttgtatttttggtagatacagggtttcatcatgtaggccaggctggtctcaaactcctgaccttaagtgatttgctcccaaagtgctaggattacaggcatgagccaccacgcctggctttgatgttcctttctttttctttatttttttttcagacggactctagctctgttgcccaggctggcatgcagtggcgcaatctcggctcactgcaacgtctgcctcccgggttcaaacaaacctctgcctcctgagtaggtgggattacaggagtctgccatcactaccggctaatttttgtatttttttttttgtagagatggggtttcactctgttggccaggctggtatcgaactcctgacctcgtgatccacccaccttggcttcccaaagtgctgggattacaggcttgagccaccgtgccctgatgtcccttttgaaaactactatgggctaggcgtggtggcttacgcccgtaatcccagcactttgggaggccgaggcaggtggatcacctcaggtcgggagttagagaccagcctggatcaacatgaagaaaccctgtctctactaaaaacacaaaattagccgagcgtggtggtgcatgcctgtaatcccagctattcaggaggctgaggcagtagaatcgcttgatgctaggaagccaaggttgtggtgagctgagatcatgccatcgcactccagccttggcaacaagagcaaaattccctctcaaaaaaagaaaaaaaaatggccgggcgggtggctcacgcctgtaatcccagcactttgggaggctgaggcgggcggatcacgaggtcaggagattgagaccatcctggctaacacggtgaaatcctgtctctactaataatacaaaaaattagctggtagtggtgacaggagcctgtactcccagctactccggaggctgaggcaggagaatggcgtgaacccgggaggcggagcttgcagtgagctgagatcgtgccactgcactccagcctgggtgacagagcaaaactccatctcaaaaaagaaaaaagaaaacagaataactcacagtattgagttattctgaataactcacagtattgagttattctgaataactcacagtattgagttattctgaataactcacagtattgagttattctgaataactcacagtattgagttattctgaataactcacagtattgagttattcagaataactcacagtattgagttattcagaataactcacagtattgagttattcagaataactcacagtattgagttattcagaataactcacagtattgagttattcagaataactcacagtattgagttattctgaataactcacagtattgagttattgagttattcagaataactcaatgtattgagggctaagtaggccagacacggtggctcctccctgtaatcccacccgtaatcccagtaatttgggaggccaaggcaggaggatcctttgagcccaggattttgagaccagcctaggaaacatagtgaaactccgtttctacaaaaaaaaaaaaaaatacaaaaactagccgggcttggtggctcatgcctctggtctcagctactcagaaggctgaggaaggaggatggcttgaacttaagaggtcgaggctgcagttagaggagatcacgccactgcacaccagcctgggtgatagagtcagaccctgtctcaaaatattaattaattaattaattaaatgtattttgtaacaacagacagtgactattttcccacttcactgacccacgtcctaccccatcctaggaaaaggggagacagtgattcacaactgaataagtgactgccctctggcaaatagggattccaagtggaacataacctctgatgccaagatttatagaatgtacatgtcttatagatacgaattttaaaattctcaatctcatctgtgtaatttaaacaagtttttagttattagattatatatacagaactcaacatgtcacaaccaatcatatccaatgaactcacccactcatctgaacccagtctctcgcccctttttttttgtttggagacaaggtctcgctctgacgaccaggctgcagtgtagtcacatgatctcagctcactgcagcctggacctcctgggctcaagtcatcctcccagcttggccaccagagcagctgggagtacaggtgcacaccattatgcccggttatttacttacttttttggcgggggggaggtctcactatgttgcccaagctggtctcgaactcctggactcaagcaatccccttgcctcagtctcctaaagtgtggagactacagactacaggcgtgagccactgtgtccagaccctctttcttcattactgtgcttccctccctaattctgtacatatctctcattctccccttctctctctagctcttgttttcttttctttttccctgggattctgctcttcattttgtacccctctcctctcctgctattcatccccttcttccctttattccttctcttccacctcttctcctccatcctcacaacttatttaacctcttattgctccttctccccaatctttcaatcgtcctcaatctccatctatttctgcctcttctcccatctctgcgcctcctctgctctccctgttaaattccatcttccccgatatactcccttgtccccactctgtgtctccccagatcccagctgtcctctctgctgtggttctccctctgttctccttgacacaagcaccactctgctctgtctgccctggctccaaatccttccctctctccctcactctgatgagtctccctctttgctgccactccccctaccttgtgatccttcatctctctgtacatctatctagcctttctctacatttctccggttgcttttctcctcctgctttcttaggtttttttttttttttttcacttctgccatctcttggcatatccctcaccaatcctctattttgccatctgttatgggcctttcttattcttcttttctctgcctcaggttttctactgctctctgtctcctgattcctttggcccacacaatcgcaacacggtttggagtaagacgcctgcatcccggaggagcgcattttccacgccctggagctccgcaggcaagaataccccgtgccgcaggacaggcccctgggacctccccagtgcaggttcaatgaaagcggtgactgcggaggggagacctggggagcagcaggccccggcatgaggaggaaggtgcggggcggggggggggggcgcgacggcgccttaggaccaggatggggtctgcaggatcccaggacctggcagaggactcggcctccccgggactggggctgcggcgcggcgctcccggggctgaggagggggaggctgggaggcgccctgggcaagaatccacatcgcgggtgaagactttaaaaagcgcggggcgcgaggagtcagaacaaggttttcagcaggaaaactacgcaacagaaagtgtatacattgacctatagcagaaagaccggggacgagaccagcctcaggacgactttaaacccaaaaggaagcgaccctcgggctctcacggggatgtctcaatttgctctgggcaaaggaagacgccggagaatttccaggtctgtggggaccccacgtcccagggacagaagccctgggaacctagttagcgcagacttaatacaacacagagcaaaactcaccgcggcgatatgacctacactccacccgatccgcttccgggtttgcgttaatctgcgcgcgcaggacaaaagccaggcctgggcgggaagtgggaggtaggcggggcctgggcgaggtaggggcggggcgcgaggcggagagaccttgccttttagaaccggcagagggcagggccggggcgggatctgcgcgtctctcagcctcgctcccagcgtctctgttttcaggttttggaggcgagagcgccagaaagtctgaggcatgatacaaaagccctgttgagagaagagagagaccctctgacattgttttatattgttttatagtcagtaaaaacaacaggaagtaaaaccaaagacaggcagccccgcgccaggcccgaaaccaggcctggatccgcctggcctaaacccagtagttaaaaatcaacttatgatttagaagctgatgttaggcatagattccagacattgtatagaagaacacggtgaaactcctgccctgttctctctctccctgatcaccggtgcatgcagcccctgtcacgtatcccttgcttgctcaatcagtcactatcctttcatctgaaatctttagtgttgtgagcccttaaaagggacagaaattgtgcactcggggagcttggattttaaggcagtagcttgccaatgctcccagctgaataaagcccttccttctacaactcggtgtctgagaggttttgtctgcgactcgtcctgctacactgtaattgtctggaacagggatacaaactagaatgtgaaatgcaaagccctgcctgggcggtatgtaccatgtcatgctgaggtcccacagaacagatagatatcctctccctttctattgtccattcactccggaaggagactccgccctgtgctcagcttcagagacttccctgaagccaccgcctggaatgccggacggagtgctcaggccgagaaggagtgaggtcaccacctgctgcttaaagacagcagaggcgcgggggcgggagcctgaggtcccagctactcaggaagcagcggcgggaggatccctgagcctcgggttccaagccagcctgagcgacaaaataacgcccactgccgcggtctccctttcttgtctctctctctctctttttttttaaaaaaaactttcgcaaataaaatttttgattgtgtgacatagggatccaacattattcttttccatgtggatatccagatagttgtcctagcacatttatggaagagatctattactttcttgtattattattattattattattattattattattatttttgagacagagtatttctctgttgcccaggctggagtgcagtggcgagatctcgactaaatgcatcctctgcctcctgggttcaagcgattctcctgccccagccttgggaacagctggcattacaggcgtgcgccaccatgccaggctaatttttgtatttttagtagagacggggttgaccatgttgaccaggccggtatcggactcctcactccaagttatttgcctgcctcagcctcctaaagtgctggggttacggcgtgagccaacatgcctggctaattttttgtatttttagtagagatgggatttcatcgagttagccaggacggtctctatctcctgaccttgtgatccgcccgcgtcggcctcccaaagtgctgggattacaggcgtgagccaccgcgcccggccagaaatattctttttttttttttttttttttttaaacggagtctcactctgtcgcccaggctggagtgcagtggcgcaatctcgactcactgcaagctccgcctcccgggttcacgccattctcctgcctcagcctccggagtagctgggaccacaggctcccgctaccacgcctggctaatttttttgggtttttttttttttgtatttttttttagtagagacggtgtttcaccatgttggccaggatggtctcgatctctagacctcgtgatccacccgcctccgcctcccaaactgctgagattacaggcgtgagccaccgtgccatgccgcagaaatattctttgcttcgctttttaaatgttgacaaaatataactgaaaactaaaaagtctcctcccaaatgagaaatcatctccacgacgataacagagaaagaaataaaaaccattttattaataaataaaccttagaccagaatgtgatgggaaatagaggcaaacagctaaaagattgaaaagagagaaagaaacttcactgttctatacaacccattaaggacatattttcaagataaatactaatcagtcctcaaggaagaggacttgacaacacccttggtcacacatagttcatcctggctctacttggtaatggaggtgaccatctgtgtcagctaactagcgtcatcctgagggagggggagaaactctaacccatgtctttttggcaagtgtgagttttacaacatggcgacaggtgccctctctggtgaggctcctaccatacgacagacactgatgtcagcagtaaataataaaatttaaagtatatgattaagtacagagttaatgtgaacacagagcttgaagaaagccacctggaaacatcaactccaaatgaatgggatcagcgttcccaagtagagacgttaaggtttcacacacagggaaagacagagaagctttagcagaatcaccacactttccattcaagaccagtgcacaggctgcagcaacttgactggtgatgatttgatacacttcaaggaaagttactttatcattacataagaagggacaatgctctgaggaggtcttatcactggggctctgtagtcttcctaatttttttattgttattgttatttatttatttattttgagatggagtctcgctctgtcaccaggctggagtgcagtggtgcaatctcggctcactgcaacctccgactccctggttcaagtaattctcgtggctcagcctcccgaatagatggtactacaggcaagcaccaacatgcccagctgatttttgtattttttttagggatgagatttcaccatgttggccagtataatctctatctcttgacctcgtgatctgccagaatcagtctcccaaagtgctgggatgacaggcgtgacccactgttcacggccagttttccaaattatttacagaaaaactcctagaagttgcgcctgcattcctctgaactcaggttgcatgaccacattcctctcaaggctcagaattatttaaaggtccatggctttaaattggaatcacttgatatttgaattacttaatttcctactgagacacaagtgctatctctgttgtttgcctttcagacagagctcccaagtccttcggaaatacattcctgggtcattaagctaaaaagcggtttagttagtttctaaaaaaattccatttctgtccgagcgcggtggctcacgcctgtaatcccagcactttgggaggcagaggcgggcggatcgcctgaggtcgtagtttgaggccagcctgaccaacatggaaaaaacccttctctattaaaaatacgaaattaactgggcatggtggcacatgcctgcaatcccagctactcgggaagctgaggcaggagaatctcttgaacctgggagacagaggatgccgcgagcggagatcacgccattccactccagcgtgggctacaagagcgaaactccatctcaaaaaaaaaaaaatactgtttcagaagacagagaaaattcatttacacattttctaaataaatgtcctaagaaaagagtctacaggaaagaaaatctcttactttattttcgaaggaggaattatgcctctcacttatttgcttgtttgtttgagacagggtccagctctgtcatccaggttagagtgtgctagtgagatcagggatcagtgcagcgtccaactccctggctcaagtgatgtttcaatctcagtgcccaaagcagccgagaacacaggtgtgcaccaccacacctggctgagtttttttatttttagtagagacgaggtctcactatgttgctcaggctgatcacacactcctgggctcaagcaatcctccggcattggcctctcaaagtgctgggatgacaggtgtgacccaccgctcggagttctggctttatttccatgaaataagaaattttcttccaccttctgtgtataataggcagttctatatgtcacctttctactttcattatccgctcaaacaacccaggaccttgcttggtttactaagccattcaaattatcagtccccgttgtaagcagcgccccactccacccctttaccgaggtacctgcccctgtaccccaacctgtcccagcctgaggggagcttgccccgcctgcaggacgcgcgactccacctgctcaaaaaaggcactttgccttaaaaccattttcaacttgggagaaaaaacgattcagcattcagtacaaaatggcccactaccaaatgttattttaccttcgattgtttgaaatgttaactgaaaacgggcaggaagcctccctgtgatattaggggtaatatgacggcacatcagaaacaatccaccaatcagaacccgggggatcgagtgctggagatcaagaggatgacagcaggccacatcatggacccagctgaggagagagccccgacgcatcgctgccaggccccgcccttaagaacaacaccccatttcaggccccgcctccaagaccagggtaaacctccggccccccagcaccgacccgctgtccagcctggcctccagcctcctccctcttgactcaccccaggccccgcccccaccttctaaccaggccccgcccccaaattgtggagtcaaatgcattagtaaatcagatacaaaatatctccccttattggtctctttttcagaatttaccggttatctgtgcacattaacatatatatttcacatgttatttctctgatctggtccacaaagagctgacatccagatgtggcccctgaaccatccaggctgcccagcagcactgacaccatggtgcccacaccccgtgtccatccatgtctgggtgtgagcccctcccaggaccatgcccagtggagcttcttaagaagttcttgtcactgggtcacaggagatggaatctcagagcagctgagaggaactgagggcaggcatgggtgagtgtgagtgaatgtgtcaggcaaaatgcttcagactcggaaaagactggctgctacaatacctggcatttcagaaaagaaagacacagattaatccacagaggaatatcacttcacctgaggaagagccagccctggctcctttcctttcctcttctgagctgcttcctcatgtaacattagtctttagaaatcaatcccgaatgtgaaaaatgaaaggggcctgccactccacacctgtggatatttctcgtcaggtggagacgagagactgagaaaacaaataagacacaaagacaaagtatagagaaagaacagtgggcccaaaggacaggcacactcagcatgcgaagacccgcaccagcgctggtctctgagttccctcagtatttattgatgactatttttactatcttggcaaggggagtgcagcagggcaacagggtgatggtggggagaaggtcagcagggaaacgtgagcaaaggaatctgtatcgtgaataagcttaaggaaatgtactgtgcctggattgtagggaaaagaaagagagatcagattgatactgtgtctatgtagaaaagggaactcgattttgatctgtactaagaaaaattgtttctgctttgagatgctgttaacctgtaactttagccccaaccctgtgctcacagaaacatgtgctgtattgaatcaaggtttaatggatttagggctgtgcaggatgtgccttgatttgttttgtttttcggaggtggagtctcattttgtcgtgctggctgcagtgcagtggcatgatctcggctcactgccacctctgccacctgggtcaagcgattctcctgcctcagcctcccgagtagccgggattacaggcaccggccactacgcccggctaatttttgtatttttagtagagacgggttttcaacatgttggtcaggctggtctcgaactcctgacccgcctcggcttcccaaagtgctgggattacaggcgtgagccaccatgcccggccaggatgtgccttgttaaccatgtttgcaggcagtatgcttggtaaaagtcatcgccattcgccattctcaattaaccagggagaaaatgcactgtggaaagccgcagggacctctgcccaagaaaccctgggttttgtccaaggtttacccccactgagacagcctgagatatggcctcatgggataggaaaggccttaccatctgccagcccacccataaagggtctgtgctgaggaggagtagtgaaagagggaggcctctttgcagttgagataagaggaaggcttctgtctcctgctcatccctgggaatggaatgtctcagtatagagctgaccattcccattcgttctattctgagataggagaaaaccgccctgtgggcgggggcgagatatgcgggcagcaataccgctctgttactctttcccacacggagatgtttgggtgaagagaaacataaatctagcctatgtgaacattggggcacagttcctttccttgaacttattcatgatacagattcctttgttcacatgtttccctgctgaccttctccccacctgttgccctgctacactcccctcactaagatagtaaaaataatgatcaataaacactgaggaaactcagagactgtgcgggtcctccgtatgctgagcgctggtcccctgggcccactgtactttccctatactttgtctctgtgtcttatttcttttctctgtctctcgtcccacctgatgagaaatactcacaggtgtggaggggctggcgcccttcactggatgtgcacgtaggccagatttatgtttcactttacacaaacatctcagcgtagcaaagagtcacagagcagtattgctgccagcatatctcacctccagccacagggcagttttctcctatctcagaatacaaagaatggtcagctttacacctagacattccattcccaggacgagcaggagacagatgccttcctcttatctcaattgaaaagaggcctccctctttcactaatcctcctcagcacagacccttcactggtgttgggctgggggatataaggtctttcctttcccacaagaccatatctcaggctgtctcagtgggtggaaaccttggacaatacccaggcttacttgggcagaggtccctgtggctttccgcagtgcattgtgtccctggttaatagagaatggagaatggcatgacttttacaaagcatactgcatgcaaaaatactgttaacaaggcacagcccacacagccctaaatccattaaaccttgattcaatacagcacatgtttccgtgagcacagggttggggctaaatttacagatttatagtatctcaaagcagaacagttttgcttcatacagatcaaaatggagtttcttatgtcttccttttctatatagacacagtaacaatctgatctctctttcttctccccacaaaaaaaaatatgagacttcatgttagaaatgactcattcccttcctggggcaaaaacccacagacaggagagatttcacccgtagaaagatggtcgtctgcttcccactgcaccagagatcatgcagagataagaaagtcccacaggaagacctacaagtgtatatttgacccaggtcttcagatctcactcccctcctagaaaacacccacatacgaggtaacgggggggcgggggggagctgggctggattgatctcccctcggcacagactcgtccctcatccctcatcaatccccatctggaggacagcccctcactctctgtggatcacaggctgagctcagcactcagaaatggaggacacagagcttccatgctcaatgctgcacacagatgacaagcacctgcgccactgcaggtattactgagggtgggttccaacccatcagaataagaatccctgctaaagcaacacaaaagctctatttgcaaaatgctctgcactctaatgtgaagccagggttgagctccactcagatggggcgagcccagcacagccccaagttcttgctccgccctccccttggggccttgtgctcactaggatccagagagtggatgacaaaggcacaaaagtaatcacacagaacaggcaagatagaccagaggtggtgtgagggttgggctgtgtgaaaggaaaataaatttggggaccccaaatcactaagcaaaagggaaaagtcaagctaggtactgcttagaaaaccagactcaccttctattcaaagtcaccactctgctccctgacatacatgcttatctgagtgcctcctttggcaacgctaatcagaaactcaaaagaaggacccagcacagtgcctcaggactgtaatcccagcactttgggaggccaaggcaggcagatcacttggggtgaagggttcaagactagcccggccaacatggtgaaacatctctactaaaaatacaaaagttatctgagcatggtggcatgcacctgtagtcccagctacttgggaagctgaggcaggagaatcacctgaatgcaggaggcagaggttggagtgagtcaagatcctgccattgcactccagcctgggccacagagcaagacttcatctcaaaagaaaaaaagaacctcaaaagatcgcaaccatttgtgcctcacttatctgtgacctggaagccccctccctgcttcaagttcaagtctccctggctttgtttaaagttgtcctgcctttccagaccaaaccaacgtacttgttactatattgactggtgtctccctaaagtgtataaaattaagctgtgccccgtccacctggggcacatgtcatcaggaattcctgaggctgtgccacgggtgtgtcctcaaccttggtgaaataaactttctaaattaactgagatctgtctgagaagtcctgggctcacagctgcaatgtcaaatgcggatctgtgtgagatcacaaaggtttccacacagaaggtgataccagaacaaacacctagggaagaaatgatgcttgtcacttgcagctgaggggacagagagtcctaggcagagggacagctcaagcaaaggccctgagacaggagcaatctcagccccaggaagaggaaagtggcccgtgtgggtggagcagtggaagaaaggagggcacagatagatgaggtcagagaggtcctgggggcacagatccatagggacaaggtcttcaaacatttttctcccacaacccaaaagaatattgaaaaccaactctgatcccagctattcgagaggctgaggcaggagaatcgcttgaacccgggaggtggaggttgcagtgagccgagatcgcaccactgcactccagcctgggccacagggcgagagtcagtctcaaaaacaaacaaacaaacaaacaaacaaactgagcactaacctctcgagaagaaaagccacacactgtattttgccagtcatttcaggggtcactgtcactgtgactgagcttttccagtcttattcctcacctctatgttaaggggggctcactgaggctcacaacgggagacatttcaccaagttatcctgagaagctctgaggtgagtagaaaataggtgtggctgactcccacgagatggcctggaagggccaataggctgccttggtcttcctcctctggaaaattgcaagatcagacgggagtcgtggcccagctgggtaatcccagcactttgggaagttgaggcaggcaggtcatttgagcccagaagtttgagaccaacatgggcaacaagggagtctggtttaataactatatttcctacaactagcatataagggggctttacacaactttgcaaaggaactgttagactggaatttaggtcgatagtataaaatggcttacgatctcttgtttctatagcttgatttccagaccaaattttaatgcggtatgaggccacagtaagactctataattttggatgttcaggaccagaaacagaacttattatctttgttcttggagtagagatttttttttctccccattcccaagggtagaaagacggcaattttttgtgcttatgtttggctaaactttttgttaagtcactgttaacagctggactcacttctgcactgggacatgactgagtttgtcctgtgcaattgtggtagaattgacctcgaggtgcccaatctataatagttccgaatttatcattttgtaatatcaccgcactattggccacacattcttcccaaactaaaacttttgtgtcttttgatcctttgggattttttgggggtaaggctttcctttaggcctaaattttaatgatctttgataagaaaagtcttgtaaataatttacctgtggcctgagtgacattccacttaccgcgtgattagtgaatctactggtggtaccgacagtaggtacttctaccaaccaatttttgactgcaggcattaaacatcctggtgctctcccgaggcaaataggaggataatgatacccagtggaaatatttatcatcattccttcttcctcaggtttggcagggcaacgatcatctgtggggccaggtacccatacactattattaacgtatacttcaataggattatccatccatgagactgcccgaattaagggcgggaaaggcacataggcccagtaggtataattagctgcagctgctcctgcaggcgtggggagacttaccaccgttgatacaatcatcaaagctgcaagcagcgtgttctctggagtttgtgtcacctttgtgttctctaggcttttttaagctaactgtgtcagcttttaaattgtgcccaagttggcagctccgccttcgtggtggatggcaacttcatctgtttttttgacatcaccattttgtttatcttgtgagtcaatggtgctcgattgcggtgtttccgtctctgtggaggcgcttttttttttgtttgtttgcatctctaatgggttcattgtagaactttaaatgtctagtgggtatctaaacaggaagctgattttctcctggtgaaacacaagcaaaacctctcccccacgttaccaccttccctatttctcatgtcttattgttgttgtctttttatcaaatcagttttccttcacgtaggctgttctttttaccagtaagatgttgttttgcagaggtagtagtctgatttctataagtgtttaaaacatttaaagtatagagtgctagattaagttgcatctgaggagtggtacactccttactgtctcccccttctctttaactgagttttgagtgttctattagtttttttaactatggcctgtccttgggaattatagggaattcctgttttgtgtgtaattttctactgatttcagaatttttggaaagctttactatagtatccaggtgcattgtcagttttgatttttttctggaactcccatgacagcaaaacaagataataaatgttttttcacatgggaagtactttctcctgtctggcaagttgcccacatgaaatgtgaataagtaccaactgttacacggacacatcataatcttttaaatgaaggtacatgtgtgacatctatttgccataatgcattaggacatagacttctgggattaactcctgcctcttgagtgggcaggtgtaggacttgacactgggtgcaatgttgtacaatatcttttgcctgttttcatgtgacatcaaatttgttttttaatcctgctgcatttacatgagtcaaagcatgaagttcttgtgcttttatgaatgcagatggtaccagtaagtcagcttgttcatttgctttagctaaaggccctggtaaattagtgtgtgctaaaatatgagtaatatgaaatgggaaatttttttttcagtttgttgtaataaactgaacagctcgtttaactgatcatctatgctatatttaattagagctgtctcaacatcccttgtagcctgcgctacatatgcagaatctgatacaatattaataggttgatcaaagtcttataacactgtaatgactgcaaccaactctgctctttgagccgattgatattgagttttgatgactcgctgttttggccctgtgtaagctgcttttctattgctggaagcatcagtaaacactgtcagagcattttccaaaggtttatgtctggtaattttaggtaaaatccaagtagtcaattttaaaaactggaagatttttgtttttgggtaatgattatcaataattcccacaaaattagtaagaccaatctgccatgcatcagaattgataaaggcttgtctaacctgttccttgtttaaaggaacaactattttgtctgcgtcattttcacacaattttattatttgtaatcttgcctgaccaattaatgtagctatttgatccaagaacaatgtaaaagtcttaattgtactgtgaggaaggaatgaccactccacaagatcagtattttgaacaatgatgtctgttggagaatgtgcagtagcaaaaatcaaaagttggagtggggttaagggacctttgtgctgactgatttttttcttttactaacttaattttttttgttgcctctggggttaatattcttttactatttaagtctgggtcccctcttaagatagagaacaaatttgacatggcataagtaggaatgcctagagttggctgaatgtaattaatatctcctagcaagttttgaaagtcatttaatgtttttaatgtgtcttttcttatttctactttttgtggcttaatttttctattttctatctgcatctctaaataatgaaaaggagtagaggtttgaatcttatcagatgctattgccagtcttgcgttggcaacctctgcttgcagaaatgtgtaacagtcagttaatttgtctcttgtttctgcagcacacaaaatatcatcaacataatgaatgatataacagtctgaaaacttatctctaactggttgaagagcttgacctacgaaagtctgacaaatagttggactattaagcattccctgaggtaacactttccactgagacctggtggctggttccttataatttatggctggtatagtaaaggcaaatttttcaaaatctttctccaccagaaaaatggtaaaaaagcaatcctttagatcaattataattaaaggccagtcttttgggatcatgaccagagaggacaacccgagttgaagaggccccatgggttgaatgatggcatttacggctcttaagtcagttaacatacaccatctgctggattttttctgaattacaaacacaggagaattctaaggagagaaagtgggtgaaacgtgtcctttttaagtagttttttaactattttatgtagcgcccccaaattttccttagggagcagccactgtttgactcagacaggatgctgcaaggcaagtctgaattgctccttcaccataatgaactgtaagttgggcaataatgggcacagcgagccaagttgcagtgagcctagtttcaggctccctcccccagcactcacttggctgaggaggaggtggccatcgtggttttagcccctatgaccccgatgattctggacctttttcttttaactttaatgtttcagaatatattacctcttgtaattgattgtagtcaacattttgctttgaccgacccattacagactctgctacatatttacaatgtgaactttccgttcctttctgggattctgtccctgtctcttcttcacaatctattacatagcttttagggccatcagaaactgaaacgctgtcttctcctgtttgaaacggttttaaagctgctttaataatggcccaatcattccataccataagtgggatgattttaccctccctacttctctgttttaattctttgccaattttttcccaatcttttagatctaaagttccctgttctggaaaccatgggcagaattgttctattgtttcaaatagcttgattagattttctgtagagactctaactcccccttttcttaaaagaattttaataaagctgagataagaggcatatttacttttagcttgtcccattgttaccctggcttttttcgagctcaggagcttaccgcaaggctgaccgtagaagtacttgggaatctctcgttgacttgtcctcaataaccacgctcaagcgtaggtttaccctagagaaaagccccacattagacaccaggtgaaggtggccagcccctctacacctgtgagtcttttttgtcaggtgggacgagagactgagaaaagaaataagacacagagacaaagtatagagaaagaacaaagtatagagaaaggaccggcgctcagcatatggaggtcctgcacaggcactggtctctgagattcctcactatttattgatcattatctctaccgtctcagagagggggatgtggcaggacaatagggtaatagtggggagagggtcagcaggaaaacatgtgaacaaagatctctgtgttatgaataagtttaaggaaaggtgctgtgttttgatgtgtacgtacacaaacatttcagtgcattaaatggtagtattgctgccagcatgttttacctctagccctaaggtggttttctcttatctcagtaaacagaacatacgatcaggttttacaccaagacattttatttttagggaggagcaggagacagatgccttcctcttatcttaactgcagaggccttcctcttttattaatcctcttcagcacagaccctttatgggagtcaggctgggggacagtcaggtctttcacttcccatgagacaatatctcaggctatcacatggggagaaaccttggacaatacctggttttctgaggcagaggtccctgcggccttccgcagtgtattgtgtccttgggtatttgagattagagaatggggatgacttttaccaagcatactgcctttaagcactttttaaacaaagcacatcctgcacagccctaaatccattaaaccttgagttgacacagcacatgtctctgcaagcacagggttggagctagggttacagattcacagcatctcaagacagaagaatttctattagtacagaacaaaatggagtctcttatgtctacttctttctacatagacacagtaacagtctgatttctctttcttttcccctcacttatcttttctaccatctgaccattttgttcagatctgctgaacatagtgtgaacgtgacacatagactgagaagtgcaattcaagctaaatatcccttaggggaccagtcaataatgattccatgggaatcattgtgcagcacctctgcctgttctgcaatgcaatcttgctaaacaaatacgttcattttttctaactgagtccaatcctgtttacaaataggtttttgggggttgtatgcctcaattacaggagcagatttattatggtaaatactgagatcagaaagcatgtgtaactgtgtcatacagtgatttacatccaggcattattaccagctaagattgataaatatgcctaataagtacaattgttctctgtgtcagcctttgttgaaggaatactcacagaaatggtgatcactgccatcatagctaccattaaattattcactgtgagtggttgtcctgctttcctcaggttgtcttcctggatctgtgacagcttcttgatctgtctccaggtcggtggctgtattcgatgggtgttgctcgtgacagttggggtcctcctcggcaccagccttgacatggctgcaaccgggggggtcctcaggatcctcccggaatctcttccttggcatctggcccatgacaagatttcaggtgtcttgatggtatccaaactgactgatgattttggcctggagaaacacaagcataacctctaccccaagttattattttacctatttcccaaatttttgttattggatctctctgccaaatcattcttctgcttctgtctttgcagctggtttctgtagatgctgttcagctgctgataacatctggcctttgggcaggctcaaaaaatttaaagttaataatgccagattcagttgctcctgtggtgttccatattctctgtctccccctttctgcttttgcaactgctgttttagggagagattcattctttccactatggcttgtccttgagaattgtacgggataccagtaatgtgtttaatattcctcatagagaaaaatgtagctagaacttggctagtatagcctggggcattatctgtttttatagaagcgggaatgcccatcaccacaaaacactgcaaaagatgacatttaacacaggcagaagactctcctgtttggcatgtaagcccagacaaagtgagaaaaggtgcccacacatacatgtacataagctagtctcccaaacgagggaacatgtgtgacatccatttgccaaaccgagttaggttccaatccttgaagattaactcctcctgtaaaagatgaggaatgtatcatttggcaagttgggcatcagtggataatatttttagcttctttccaggtaatgctgtatctgcatttgagaccagaggcattaacgtgggttaaatggtcaaaatgtctagcattagatattgcattagcaactaagtgatcagccatttgattcccttcagtcaaaggtcctagaagaggtgtatgagcccaaatgtgagtgatgcaaaaatggtgcattctacttctaactgctgtttgcaattgggtaaataaagtcatcagttgttcatctgtatgaaattgtaattgagcattttcaattaactgtgtggaatgaaccacgtatgaagaatcagaaatcacattaataggtatatcaaaagcagtcaataactcaattacagctactcagctttttgagctgaagtatagggcgtctgaaaactttactttttgagccaaactaagaagctttaccattactagacacatctgtgaaacaatgaaaacgcttagcaggctgcaggttgtttactgcaggaattgtaaatgcaaaccattcacagtcttgttcagctaaggggatagtaaagaaacagtcttttaaatctatgactactaaaggccaatttttggaattttagtaagagaaagcaatccttgctgtaatgctcccataggttatatagttgaattgatagctcttaagtcagttaacatcctccatttacctgattttttcttaattatgaaaactggagaattccaaggggaaactgttggagcaatatgcccattttctatctgttcagtaactaatttctctaaagcctccagtttctctttacttagtggccattgttctatccaaattggcttatctgtgaaccattttaaaggtataggttctggaggcttaacaatggccaccatcaaaaattatttcctaatctttggcgggaactttttaaaccttgcaaatttttttgtagtcccataccagggacataccccatttcatgcatcatatgttgactttgagggctatataattgttctggaattagaacttgggctctgcattgttgtaataaatctcttccccataaatttatagatacagaagttataattggttgaatagtctcgggttgtccatcgggcccttcacaaggcaaaacagaactactctgatatacttcaggggcttcaccaactccaactatgttaaattgagtgggttgaattggccacgtggacggccagtgctgtagagaaatgattgaaatgtccgctcttgtatctaccaaacctttaaatttctttccctgaatagttatttcacaggtaggacatttatcagtaatttggttgacccaataagctgctttgccttgtttatttgtgcttccaaatcctcctgttcgtttaatttcactttttcccatttccacatatggcacaatcaggagctgtgctatgggctctcctggctctgctttccaggaaacataagtaggtataacaatttgaatttccctattgtaatctgaatcaatgactcctgtatgtatttgtaccccttttaaacctaaactagactttcctaaaagtaatccgattgtacccgctggcaagggtccacagactcctgttgggaccttttgcgggggttccccaggtagaagtctcacagcttttatgcagcataaatctactgtggcactaccggctatggcgggggacagacattgtacaggggtgagggaatggtctgagctggaaatgcccccgtttagaatggggcccgggacaggcccctcatggcatttcccgaaatcgtattcccatctttatgaaacttagagggacactgattagcccaatgttttccttttttacattttggacatatttcaggatctgcagttttcttttttcccctatctggtggcctgattcgctgattttttctacatttgtttttagtatgaccatgcttcccacagttaaaacaagcgccaggaaatggagtatttcctttgtccactctcagtcctgccattgcctgtgccaacaaggcagctttatgcagattacctccgataccatcacaagccttgatataattaactaaatgtgctttccttctaataggtcacagagcagcgtggcaattgggattacagagcgagactccatctcaaaaaaagaaaaaaaaaaagcattgtcaaaacttaataactgcaacactatatcctgagcagctgaatctgcaatcatctttttaagagacttctgtaaccaagctataaaatcaacgtatggttctcttggtccctgtttcatagcactaaaggaagggtattgttctccacatgaagtgattttttcccaagctctaatgcacactcctctaagctgttctatggcatcatcctgcatgaccagttgggcacctaagccagcccagccaccaacccccaaaagttggtctgcagttacattaatttgaggttgggcctgggcattgcgagcagcctgaatggaagcttcatctgcccaccaagttttaaattgtaagaactgagcaggagttagataagctcaagtaagacagtcccagtcagtaggtatcatctgactggaaatagcaacattctttaacagtcccattacaaaaggagaacctggtccatactgatttataacttgtttaaattctttgagtaacttaaaaagaaaaggctcaaatatagttgtaatatttccctgttgatctggggggtgtattctaacagggaactgccaagtctctaaatcaccctctcttctagcttgctgaattcctgcctgaatagaactaagagcgattgcttgaggcactgatcaaacagtcactggggcaactccttttcacccagtgttctccagaaaagaaagatctggaaggtcattttcttcaaaataataatgagggggtgcagaaaggtagggatgaacctcttcctcttttgccgctttagctttagctggcaaataaacctgctctgtaacctcttctgtcacttcctcctcatcataactgtgaataagttccaaggtggaacgaaccagaccccacacctgtcccattgttaccctgaggcttctgagctcctcttgttactcaccacagggattgctttaagagtacttgggtgtcctccagctagttttccattccaactgtcgctccggtgacccttcaacctggattcgagcccccatgaaggtacgccacttgccgagaccagctcagtcagggagaccctaacccagtggtgctacaggaatgaaagacacacacacagaaagatagaggtgtgaagtaggaaatcaggggtctcacagccttcagagctgagagccccaaacagagatttacccacgcatttattaacagcaaaccagtcattagcattctttctatagatattaaattaactaaaagtattccttatgggaaacgaagggatgggccaaattaaacgaataggttgggcttcttaactgcagcaggagcatgtccttaaggcacagatctctcatgctattgtttgtggcttaagaatggctttaagtggttttccaccctgggctggccaggtgttccttgccctcattcccgtaaacccacaaccttccagcatgggcgttagggccattatgaacctgttacactgctacagagattttgtttttggggggcttgctcccaacaagtttggccttcccacctctatacagtccgataacggaccagcctttattaggcaaatcacccaagcagtttctcaggctcttggtattcagaggaaccttcatactctttaccgtcctcaatcttcagaaaaggcagaatggactaatggtcttttaaaaacacaccttaccaagctcagccaccaacttaaaaaggactggacaatacttttaccactttcgcttctcagaattagggcctgtccttgaaatgctacggggtacagcccatttgagctcctgtgtgaatgctcctttttattaggccccagtatcattccagacaccagagcaacttggactgtgccccaaaaaacttgtcatccctatcttctatctagtcatactcctattcacccttgtcaactactcataaatgccctgctcttctttacactgccagtttacactgtttctccaagccatcacagctggtatctcctggtgctatccccaaaccaccactcttaactcttaaagtaaataaataatctttgctggcaaggctatgctgaacctccttaggcactctctaattggatgtcctgggtcctcccaattcttagtcttttaatacctgtttttctccttctcttattctgtttagtttttcaattcatacaaaaccatatccaggccatcaccaataattctatatgacaaatgtttcttctaccaaccccacaatatcaccccttaccacaaaatcttccttcagcttaatctctcccactctaggttcccacgccgcccctaatcctgctcaaagcagccctgagaaacatcgcccattctctttccataccacccccaaaaattttcgccgccccaagacttcaacactattttgttttattttttatttattataagaagacaggaatgtcaggcctctgagcccaagttaagccatcatatagcctgtgacctgcaggtacacatccagatggcctgaggtaactgaagaatcacaaaaggagtgaaaatggcctgttcctgccttaactgatgacattactttgtgaaattccttctcctggctcagcctggctcaaaagctcccccactgagcactttgtgacccccggccctgccctcaagagaacaaccccctttgactgtaattttcctttatgtacccaaatcctataaaacagccccacccctatcactctcgctgattctctttttggactcagcctgcctgcacccaggtgaaataaacagacttgttgatcacacaaagcctgtttggtggtctcttctcacagacgggagtgaaatttactgcagaatatttcccaaagtctcataatgatgcagaaatacatgtgtacaagacttgttctgacacctggcacagaactgacagtagtggctccccagggaggctggaaggagggtggaggacgtgacagggaagtgacagggaaaggagatgctttatggacaagggcctaagctgcagctttgcttggagcgttaccacaaaacaaatacatacatcatgtgatgtttaaatatcacaatatatatttaataataattggtggggctgagcacggtggctcgtgcctgtaatctcagcactctatgaggctgaagcaggcagatcacctgaggacaggagttcaagaccagcctggaatcccagcacttagaaaggcaaaggcgggcggatcacgaggttaggaaatccagacagtcctggctaacaaggtgaaattctgtctctactgaaaataccaaaaaattatccgggcgttgtggcactcaactgtagtctcacctactcgggagcctgaggtaggagaatcgcttgaacctgggaggcagaggttgcagtgagtcgagatcacgccactgcactccagcttggctacagagcaagactccatctcaaaaaaaaaaaaattaaccagccatggtggtacgcacctgtggtcccagctacttgggaggctgaggcttggggatggcttgagcctgaaggaggttgcagtgagctaagatcatgccactgcgctccagcctaagcaacacagcgagaccttctctcaaaataaaatcaaatatatgaaaacagaataactcaaagtacgaaaatccattttgtttatataggtccgcaaaataataaaacctacacagactcacaagaaactagatgttaacaaaaaaagttgtcattttccccagattttcttttctttcttttttttttttagacagggtctcgttctgtcgcccaggctgcagtgcggtaatgcaatcttggctcactgcaacctctgccttctgggttcaagtggttctcctgcctcagccagagtagctgggattaccggtgcccaccaccatgcccggctaacttctgtatttttagtaaagatggggtttcaccatgttggccaggcttgttgtgaactcctgacctcaggtgatccacccacctcggcctcccaaagtgataggattacaggcatgagccaccatgcccagcagattttcaaaatatatacatatgtgtgtgtaaatatgcatgtatatgtatgtgcatgtgtatgtgtgtgtgtgtatatatgtatatatatatatatatatatatataaagattttaaaaatataaaaagtaacaagatttgtttaactgaagaggaatctcatcttgctagaaaatgacactttggcagttgggggtaggggggaatcttgtcagatctaagaaaacaggaaatgccccatgctagaagaagcaatcaccctttcaactgactgacctggaggaagcttcagatatctgtagtaatgcaggcatgtggagaggcagccactatggcactccttatacaaggaaaaatctcaaaggatccacatgttgtcattcagccaatttccaaagcagatgtcaaagagcaagctagccatgtttactaacttgacaacatgtaaattttcgcaactagcaggatcaaatatcaaagtaaaatatttactaaaacacaaagaagaaaacaacagacgctggggtctacttgagggtagagagtgggaggaaggagaagactagaaaaaatagctattgggggctgggcacagtggcttacacctgtaatcccagcactttgagaggctgagaggcttcgatcatctgacatcaggagttcaacatcagcctggccaacatggtgaaaccctgcctctactaaaaatacaaaaattagccaggtgtggtggtggcatgtgtttgtaatcccagctactcgggaggctgaggcaggagacttgcttgaacccaggaggctgaggttgcagtgagccgagatcatgccatcacactcgagcctgaataaacaagtgcaaaacttagtgtcaaaaaaagaaaaaagaaaaaaaaaactattgggtactgggcttgatactggagcaatagaataatctgtacaacaaacctcaatgacatgagtttgcctatgtaacaaaccatcacatgtagccccaatcctaaagtaaaaacataaatataaaacgttttatttttttaatttactacagaattatttttaaagtctcataatgatgcagaaatacacgtgtatgagacttgctttgacacctaacacagaattgccagtagcggctccccagtgaggttggaaggagggtggaggacgtgacagggaaaggagatactttatggcaaagggtctaagctgcagctttgctcggggttttactagaaaacaaatatatccatcacgtgatgtttaaatatcaaaatatctatttaataataattggtggggctgagcacagtggcttgtgcctgtaatcccagcactctgggaggctgaggtgggcagataacctgaggtgaggagtttgaggccaccctggccaacatgatgaaaccccacctctactaaaaatacaaaaaaattaaccgggcctggaggcacatacctgtaaccccagctacttgggaggctgaggcaggagaatcacttgaacctgggaggcgcaggttgcagtaaactgagatcatggcactgcactccagcctgggtgacagaggctgactccatctcaaaaaataaattgtaaccatttttaccgaaaacacctgtttcacaagcctctccacagtaaccccacagtctccatgagcttaatgtgctaagaatggtttaatgaatctcctgctattatttaggttgatttcctattcttaaactaatgatggaataaaacaccttctatcattcatgtctgtgtatgaactttccattctaattagtacaatttttggagtcagaaacacagtaattcactaaattacctaaaaatgtagtataaaatcagggagaaaagattttttcttattggtctccttttctagaatttagacctactttgtgcacattaatacgtgacttccattggcagctgctctaatcctggtccacagagagatgacagagcatccagatgtggcccctgaacaatccctgctgcccaacagcactgacaccatgggaccctcactccgtctccatccatgtctgggtgtgagcccttcccaggaccatgcccagtgcagcctctcctatgttcatgtcactggatcatgaaagataaaatctaagccagataagagggaatgagggaaggcatgggtgagtgtgagcaaacctgtcaggaaggatgcttcagactcagagaagactcccaactccaaggcccagcgttactcaaaggaaggagacagaacaatccaccgagaatatcatctcacctgaggaagagccatccctgactcctttgctttcctcttcctcttctgggtttcttcctcacgtaccaaaagtctttagaagtcaatcctgaatgttaaaaatatgttatttattgctcagaatcaacacatgccctccctgtaacacaatcacacaaagtgtaatgcacgtccgtgtgaagagaccgccaaacacaatttgtttaaataatgaggctgtttatttcacctgggtgcagccgggctgagtctggaaagagagtcagcaaagtgtggtgggattatcattagttctcataggttttgggacaggcggtggagttaggagcaatgttttgcgggcagggggtggatctcaccaagtacattctcaagggtggggagaattacaaagaaccttctgaagggtgggggagattacaaagaacctttttaagagtgagggagattacaaagtactttgatcagtcagggtggggcagaaacaaatcacaatggtggaatgtcatcagttaaggccattttcacttcttttgtggatcttcagttgcttcaggccatctggatatatacgtgcaggtcacaggggatatgatggcttagcttgggctcagaggcctaactaaagacctcaccctgaggaaatagtccccccttctgccctcctaaccatggatgataaactcctacagggaaactcccgctccccttctggaggagtccacacacaagctgcagcagtggggagctgggctggaatgagctccccttcagggcacagacccagccctgaccgaaccccacgcagaggctgggtgcggtggctcatgcctgtcatcccagcactctcggaggccaaggcgggtagatcacttgagctcaggagtttgagaccagcctgggcaacatggtgaaaccccatctctaccaaaaatacaaaacttagccaggtatggtggtgcatgtctgtgtgtctgtggtcccagctacttagaaggctgaggtgggaggatcacttgacctgaggagtttgagagcagcctggccaacatggtgaaaccctgtatctactaaaaatacaaaaatgggccgggcgtgtgggtcatccggtaatcctagcactctggaaggccgaggtgtgctgattacttgaggtcaggagatcgagaccagcctggccaacatggtgaaaccctgtctctactaaatacacaaaaagtagccgggcttggtaagtgtctgtaatcctcactacttgggagacagaggtaggagaatcgcttgaacccgggaggtggaggttgcagtgagccgagattgtgccactacagtccagtcttggtgacagacaaagactcaaaaataaaagaaaataaaagtaaaaatacaaaaattagccaggtgtggtggcagacacctgtaatctcagctacttcggaggctgaggcacaagaattgcttgaacctaggagacagaggttgcagtgatccaagatcacgagactgcgctcacagcctggacgatagagtgactcagtctcaggaaaaaaaaaaaaaaaaaaaagcgcatttctgatgtgattgatgcagagataataaaacctgagtaacatgatgcagactgatgggcagagggaacttcagacgggggtgggagggcatgggagacagctctgagcctagatctggaggagaaatggacagggtacatagggtaagagcagggacaatgacagggttttgatgtttgggaaaagagaaaagcaaatgtgactggggcaaagggattcatgagatgagggcaagctcccaggaggaggctggacactggcaggggccctggacacagggctgtggagccacagtgaggggttgggcttttgtcctggggaacacgggaagccggtggagggttccctgccagggattgacgtgacctgctttagatttcgctgtgatatcctcatacagagaaaggccccgaagatggtctctgtgtctgagtctacctctgtttcttccattcttctgcttttgttttttattttgagggcactgcatcccattgaaaattctaatcacaactgggcactcctctcctcaaaaaaataaaaaaaaaaaagccacacccagacacgcactccattttgccaatcatttcaggggccagggtcactcgggttgagcttttctggtctagtccctcgtcgccaagttgcagggaggctcactggggctcagatcggaagacattttcaccaagttaccctacgaatgtctgagaggagtgagaaggtgtgcctgaattcttacatgggggcctggaggggctaataggaagggttggtcttatcatcctcatcctggaaaattagagaagcctctttcacaaacctgggctaaagaaacttcttttgcaaggttctgatgccattgattcctgacagttaattcttccttacaggaaaatcacaggaatatttataaaatgcagaagtgtgaacacacagctattgaccttgaaaacagggaaagaaggtcaactgtagcactaagaaataagcaaattgtttcaatcaagaatacatgagtggtcaggcatggtggctcacgcctgtaatcctagcacttttgggaggtcgaggtgggcagatcacctgaagtcaggagttcgagaccagtctggtcaacatggtgaaaccctgtctctactaaaaatgcaaaaaattagccaggagtggtggaaggcacctgtaatcccaactacttacttggtaggctgaggcaggagaatcgcttgaacccgggaggcagatgctgtagtgacacgagatcgcaccattgcagtccagcctgagcaacaagagcaaaactccatctcaaaaaagaaaaagaaaaagaaaaaaaaaacagaggccaggcggggtggctcatgtctgtaatcacagcacattgggaggccgagtcgggcggatcacaaggtcaagagttagagaccagcctgacaaacatggtgaaaccctgtctctactaaaaatacaaaaattagccaggcatgttggtgggtgcctgtaattctagctactcaggagactgaggcaggagaatcacttgatcccgggaggcagaggttgcagtaagctgagatcacaccactgccctccatccaaggcgacagagcaagactccatttcaggaaaaaaaaagaaaaagaatacatgggtgcttttggaggagagttccatgccaatccagcccatgtttcaacatttttccagaatggaccagagggccttgagggaaacacgcaataaatagctcccagctcaagattttaacaaatgacataaggaaagaaaactgaaaaacagactaactggttaaactacattttgatgtttagttaaaaggtcactgacatctataccaagtacacactgaaacaatcaaacttaagtattgggtatgaaacgcttccaataaataacaaagaccagaaagcatgcagacttcgatctgaactggatgcaactaatttcaaacagcaactattttttttaatctaatgaattctggggtcaactggaaaagaacaggagaatatacaagtacagaaatgaatgatgtgagctgactatacgatgctgcaaaggcatctttcagatgtgattatatactatgaaagaaatacaatttttaaaactaagatttatctcaaactcaaactgcaaaaaaaaaaaaaagagagaaatgaagaggaatcagaaaggaaaaaaaaggaagtctattgaacaatgagaacaaaagcatttttaatgtttttttttaatattttttgtttgctggtttctttgagatggagactgactctactgcccaggctgagggcagtggcacgattttgcctcacggcaacctctacctcccaggtttaagcgactcttgtgcctcagcctctcaagtagctggaactaaaggtgcacaccaccaccccccggctaacttttgtatttttagtagagatggggtttcaccatgttagccagggtgctcttgaacttctgaccttaggtgatccactcacatcagtctaccaaagtgttgtgattgcagggatgagccaccatccagctttgatatcctttttttttttttttttttgagacagattctcactgtcgcccaggccggagtgcagtggcacgatgttggctccctgcaagctccgtctccaggattcacaccattctcctgcctcagcctcccaagcagctaggactacaggcacctgccaccacgcctggctaatattttatatttttagtagagatggggtttcaccgtgttagccaggacggtctcgatctcctgaccttgtcatgggcccgtctcggcctcccaaagtgctgggattacttacatgagcctccgtgcctggcctgatctcccttttataaagtactatatcaaaaaagtactatctctttaaaaagtactatctcaaaaaagaaaaatagaaaataagaatcaaaaaacaggctgggaaaagtggctgacatctgttggccatgctggtttcaaacttctgacctcaagtgacctatgtgccttggcctccaaccgtgctggaattacaggtgtgagaaaccacacctggcccaatcctcttaacataaacacttgaatgtcaattaagggttgaactcaatgttaagtcaacacaaactcaagtcaatgctggactgactctagtgtcaattaatgcttgatggtttgctatactcactgcattgggaacagttatctcaaaaatgaattttctgatgttctgcaaggagtgacctcggactcaagaccttgccacacttctgacatttgtaagatttctgtccagtagggattctctgatgtctaatgaggtgtgaacatgaagtaaaggctttgccacaatcatcacacatgtgaggtttctctcctgtatgaattctcctatgttttgcataggatgaagcttgactgaagaccttgccacagtcatgacatttgtaaggtttctctccagtatgagtgtgtcaatgaactgcaatgtatgaatgatgtctgaaaaatttgccacatttattacacttgttagatctttattcattatagattctccaatgatttgcaatggttgtagcgttactgaagactttgtgacaatcattacattagtcaagtttccctacaccatgaactgcctgatggtgaataagtgttgactgcttgctaaaggctttgccacactcattacacttgtaaggtttctctccagtgtgaagtccagtatgttgtttcaggtgtgaatcactcccaaaagtcttgtcacaaaccttacatttgtatggtttctttccaggatgaattctcctatgtcttttaaggtgtgatttgcgactgaaaactttgtcacatgtttcacatttgtaaagtttctccccagcatgaattctatgatgaagtgaaagttgtgattgttgattaaaagccttcccacattcattacacttgtaaggtttctctgcagtgtgaattctggtatgtcttgccaggtatgaattacgcacgaaagccttgtcacaaaccgtacatttgtaagatttctctccagtatgaagtctacgatggtgaacaagggatggcttgtgactgaaggtcttgccacactcattacacttgtaaggtttctcaccactatgaagtctacgatggcaatgaaggtatgacctctgactgaaggtcttgctgcactcattacacttgtaaggtttctcaccactatgaactctgcgatggcttgcaaggtatgacctcagacggaaggtcttgctgcactcattacacttgtaaggtttctctccactatgaattctagtatgttttgccagataggaatgacacgcaaaagccttgtcacaaaccttacatttgtatggtttctctccggtgtgaattatcttatgtgtctcaagggttgatccacaactgaaaaccttttcacattcttcatatttgtaaggttgctctccagtatgaattgacttatgaattagaagatctgaattttgaccaaaggtcttcccacattcattacacttgtaaggttttcctccactatgaattctagtatgtcttaccaggtgtgaattccacgcaaaagccttgtcacagaccttacatttgtaagatttctctccaccatgaagtctatgatggcatacaagggatgacttgtgactgaaggtcttgccacactcattacacttgtaagttttctctccagtgtgaattcttttatgtcttgccagctgagaattccatgtgaaagctgtgtcacaaaccttacatttgtatggtttctctccagtatgaattctcttatgtgactcaagggttgatttccgactgaaaactttgtcacattcttcacatttgtaaggtttctctccagtatgaattctacgatgacgtgcaaggtttgattgctgattaaaagctttgtcacattcattacacttgtaaggtttttctccagtatgaattgccttatgaattacaagggctgaattttgaccaaagatcttgccacactcattacacttgtgagattttactgcagtgtgaagtctacgatggcatgtaagggatgatacctgactgaaggactttccacactcattacacttgtaaggtttctctccagtgtgacatctacaatggcatgtaaggtattgcttgtgattaaagagcttgccacatacatcacatttatattgtttgtctcctaaatggggtatctggtgtttccttaagagtgagctacaattaaaggctttgccactctcattacattggaaagatttttctctcatgtatacttcctgtttttgtgggagtagtgaagaattcggggaattattcccatagttattagaaatatggatttggggcctaggagaaattctttgggatgttgaaaccgagggagcatcactggtagacttctcaaattgattaccaattttacctttgatctgaattatgtggagttcaggcagatgtgaataaaagcttgatccaagctgatctttaataggcttgtttccagcatgcctgtgatcatgttggtctgtgctaccagtcaacttttttatttttgtcatgggtgcttcatggccatttctttcatcttcttgacactgaaactcaatatcatgaatttctttctcaatttcctggaagcaaaaatctccaatgtgataactttgatatctttgcaatgtccctgtgtggatcacttctgtattgccttgccctgttgacaagacctccttcatcatgcgtttggaagagatatctacaaaatataaacaacaataggtttccaattaagtacagatggtaaatcatactgaagtgtgtaaatatgacacaaaaaacaatacttattttgaacttcccaaatatcatcttcaaagtttaggaacacaaaaggagtaagattctttaataaacaaggggcaattacatgtccttcaaatcaattctatgaaagtctatttcctatgtcatcacaaaacactgacagggcacaaacgtgtaagcctaaggtaaggagtatttttccactgtgaccctaaagtgtatcacaatttgcaaaaaacatatcactgtcacatcaatgaagagaaaaatatatatttttcatatttaaaccatatttactgtgtacaaatgctaaaaaaaaaacaaagaaacccacacaatatactatattggtaaataatccacaaactcatgtaaggataaccaaaatcaatggaaattctgtattttcaaacaattatagcaccgagaagagaagattacaaaaattaaccaggtgtgctggcccgtgcctgacagtcacagcaacttgggaggctgaggcataagaatcacctgaacctgggaggcagaggttgcggtgaggcaagattgcacctctgcactccagcctgggtgacaaagtgagactccacctcaaaaaaaaaaaaaaagcaaaaaaaaagttaattcaatatttttctcaataaatgtcataaaattacctatatccacacaggacaggcacttaatgacttttcaaaaaatttttgtatttttatttttttgagatggagtcttgcactccagcttggagtgccatggcatgatctcagctcactgcaacctctgcctcctgggttgaagtgatcctcctgcctcatcctcctgagtacctggggttacaggcatgcacaactatgcctgggtaatttttgtgtttttagtagagatgtgtgggcagcaagccaactaggtgccaaggcaagagttcgagggcacaagctgttccaatataataaaatatataaaataacaagagttatactagatctagatcatagacatgattatatatgaatgtcattaatcattagttggtagcaattactctttattccaatattataataatcctcgctctataatcataacctaagaaaagccaggccatacagagataggagctgaggggacacagtgagaagtgaccagaagacaagagtgcgagccttctgttatgcccagacagggccaccagaggactccttggtctggcagtgatgccagcgtctgggaagatgcccgttgccaagcggaccatggtctagtggtagcatcagtgccaaggaacaacacccgccacttagcagaccgggaaagggagtctccctttccccgggggagtttagagaacactctcctccaccacctcttgcggagggcctgacatcagtcaggcccacctgcagttatccggaggcctaaccgtctccctgtgatgctgtgcttcagtggtcacgctcctagtccaccttcgtgttccgtcctgtacacctggctctgccttctagataacagtagcaaaatgagtgaaagtactaaaagtgtctgatatgcagaaataatggcgcaagctatctctctctctccctctctctgcctcggctgccaggaagggaagggccccctgtctagtggacaggtgacccacgtgaccttacctatcactggagatggctcacactccttaccctgcccctttgtcttgtatccaataaatatcagcgcagcctggcattcagggccactacccatctctgcatcttgctggcagtggtcccccgggcccagctgtcttttcttttatctctttgtcttgtgtatttatttctacagtctctcatctccgcatagagagagcaaaacccaccgaccctgtggggctggtccctacagagatggggtttcaccaggttgaccaggctggtctcaaactcctgacctcaagtaatcttcccgcctcagcctcccaaagttctgggattacaggtgtgagccactgtacctggtggcactttgtgacattaatgagtggagtgtggcagttatattgcataccacataccgaaaagccatatgcaaaattataaaaattaattaataaaatattgtaacccatgataaaaccagcaagcaagtaagtacatttatacagcctgcagaattctaaacaattccctcttaagaaaaaagccacaacatctacttaaccaccagcacacaatataagaactgaaatacatgttaagatcactaccttctcatgtatgaggtcaagaaaatacacagcattttaagaaataagaattgactaatggctggtaacggtggctgacacctgtaatcccagtactttgggaggtggagacatgtggagcacgaggtcaggagttcgagaacagcctggccaacatggggaaaccccatctctactaagaatacaaaaaaaacagctgggtatggtggcagacacctgtaatctcagctactctggaggctgaagcaaaagaatcatttgaacccaggaggcaaaggttacagtgagccgagattgtgccattgcactccagcctggttgacagggctagactccatctcaaataaataaataaataattgactaatagtgtagaaaagtacaattatgatgtcacaactacacttatgtaacagccaggcaatacagcaattttacatttgtgcattccccatagttatctagttcactatgcgtaagatataaaacatagaatgtgtactgggaaaatttataaacagatcagagaaaatattgtataaaacaaattgcacaataagaacaaaaaatatgatgtatgttccctggcccgaatgttcaccttggctaaaagtcattatcagatttcttattctccaataaggatgttcctgcagttggggtcttttagagaatttggtcatgggtgttgactaattgtgaataggactagggcttttaattgtattttttctttctttatctacttttgagacagagtttcgctcttgttgcccaggctggagtgcaatagcatgatctaggttcaccacagtctctacctcccaggttcaagcgattctcctgcctcagccacccgagtagctgggattacaggcatgtgcaatcatgcctggctcattttgtatttttagtagagacatggtttctccatgttggtcaggctcgtttcaatctcccgacctcatgtgatttggccgtcttagcctcccaaagtgctgggattacaggtgtaagccaccacgactggccaggactactgtttttataaaaagagacagtaaagagctcattgcctgctcctctttcccccatgtcaggacactgcaggaaggtggctgggctaaaccacgaagaaggctctcaccaggagccaatctagctgacatcttgttcttggatttcccattttccagattcatgagaaataaatttctatgtcttaagctttcaagtttcagctatttctttttttttgtctgtcatgcttcatcacccaggctggagtgcagtggcacgactctcctacctaaagagattctcatgcctcagcctcttgagtagctggcactacagatacatgccaccatgcctggctaattttttttttggaaacagagtctcactctgtcacccgggctggagtgcagtggcgcaatcatggctcactgcaacatccatctcccaggttcaaatgattctcctataggtctcagcctcacaagaagctgggattacaggtgtataccaacacacccagctaatttttgtatttttaccagagatggggtttcaccatgttggccaggctggtcttgaaattctgacctgaggtgatccacccgtctttgcctcccaaatttttgggattatagtcgtgagccatcacgcccgtccaattttttttaatttagtagattcaaggtttcattatgtttgcccgactgctctcaaactcctgacctcaagccatctacccacctcagcctttcaaagtgctggaattagaggcctaagccactgcggctggccagtctaagctatttctgacagaacagtgaaaagagtgagataggaaaagaggcatctcatcatcaacatcactgaaggctgacaaatcttattaaacaaaggaagttgagtgtgtactataaaacttatatgaagccatctaatagtattcacttgttttaaaaagcaggtggacgaatcacctgaggttgggagtttgagaccagcctgaccaatatggagaaaccccatgtctactaaaattacaaaaattagccagacttgcaccaggcataatcccagctacttgggaccctgaggctggacaatcacttgaacccaggaagtggaggttgcggtgagctgagattgaaccaatgtactccagcctgggcaagaagagggaaactccatttaaaaaacaaaaaaggccagacacagtggctcaggcctgtaatcctagctctttgggaggctcaggcaggtacatcacttgaggtcaggagttcgagaccagcctggccaacatggtgaaaccccatctctactaaaaatacaaaaattagccaggcgtggtggtgcatgcctgtaatcccagctacttgggaggctgcagaaggagaatcccttgaacccgggaggtggaggttgtggtgaactgagattgtgccattgcacttaagcctgggcaacaggagcaaaactccatctcaaaaaacaaacaaacaaaaaccaaaaaccaaccctggaggcaaattaacattatttctcaaataacaaaagcaggcccgcggtgttcatggacatgaccccagtttgcacgtacggtaagtgagggacaagacttgatcctgggcatgaaggatcccatgacatgttcttaggcacaatagtcagcccaggcaggacaggaaatgaccagacacagaaaatacaaggagaacagatagaagtacatcaagggggatacaaggactgagctgggacacaagcgctgagctgcgctgctgacagtggttctgaagccatccctcatggatcatgtgctgagtcatgatgccctgcacacactgatttaagcggcctcctataattttgtccagtggatgaacaaggtcttgacttactcagtgagagtagtgttggaggggaggggctcacggggaaattggggtgttcactattacaaagtcaataggctggtatttgcatccagatcaatgtatcatgtgaggcaaggccaggaaaggaagggcaagggtggagagcaggaagtaatgggcatgtaggagtgaactttgtgcatgcatgtctgtgggaatataattccactaggatagaccaaatcttgagcttggaagaaagtggaactaatttagcaaatggtaaaatattgacccaaggttaaatattcaaattacaatatgggcaagggacaagaatgaaagagatccaaaaaagcagcagtatggtggcctgaggtgaaagcaattttacatctcttaaattaaatgcctctgatttctagtttcaagcatatactcaacaataatcccctgtgtagattccagaaatgtgtacacacaaaaaaataagtaaaccctatgaagagtacagtagagcaatgtaggagaccatggggttgaagaaggatgccctggctgagtaggtagagatgtgtttgtgaaaacagagccaggctgagtgcagtggctcacgtctgtaatctcagctcattaggaggatggatgggtggatcacaaggtcaggagttcgagaccagccaggccagcatggtgaaacactgtctctactgaaaaaatataaaatattagcccggcatggtggtgcatgtctgtaatcccagctactcagaaggctgaggtaggagattgcttgaacctgggaggtggaggttgcagtgagctgagattgcaccactgcactccagcctgtgtgacagagcaatactccatctaaaaaaaaaaagaagaaactataactttaatagaaatgtggtttcaccatgttggccaggctggtcttgaactcctgacctcaggtgattcacccacctcagccttccaaagtgctgggattacaggcgtgtgccactacacccagcctggcagcattatttataatagtaaagagaagaaaccaacccagatgtccatcaacagataaatatatgaacaaaatgtggtatacacatacaatggaatattattcagccttaaaaacaaacttggatgggtccaggggctgtggctcatgcctgtaatcccagcacattgggaggccgaggtgggtggatcacgtaaggtgaggagtgagagacgagtctgaccaacatagagaaaccccgtctctactgaaaatacaaaattagctgggtgtggtggcacatgcctgtaatcccagctacccaggaggctgaggcaggagaattgcttgaacctgggaggcagaggttgcggtgagccaagatcataccattgctctccagcctgggtaacaagagcgaagatccatctcaaacaaaaaaacaaaacaaaaaaacaaccaaaaaaaaaaaaaaagccatgcatggggcaaaatcacaaaagagaacacaaaaccaggaagggccaagatagacaagagcagactcctcatgtctgggggacatcattttcctcacccacagcttccaggttcctgtagttctccaacatcacttccctgtacaaagccctctgcgaagggttcaggcatttccactctgccaatgagaattctatagccacatccctgaaagtcaagcgtccctaaaatgaaacacacatttccacaaaacattatggaggattgagttatcaccttcatgggaaatgagaaaagagaaaataagtatttgatcaaagactgtgttctgacaaaatgttaaggtattttgaatattttttccctatagttgcattttattgtacttttctttgaaagattttaagatgccataagtcactatggaagtctcaatttcatagacaacataaaaagtataaaaataaaaaggaaacacagggccaggcatggtggttcacacctgtaatcctaacacttcgggaggccaaggcgggcagattatttgatgtcaagagttcgagaccaccctggccaacatggtgaaaacctgtctctactaaaaatataaaaatttgtcaggcatggtggcaggcacctgtaatcccagctacacaggaggctgaggcaggagaatcacttgaacccaggagatggaggctacagtgagccaagatcgcaccactgcactccatcctgggcaacagactgacactccatctcaaaaaacaaaacaaaacaaaacaaaaaaacaatgccgggcagtgactgtcacctgtaatcccagcactttgggagaccaagacgggcagataatgtggtcaagagattgagaccatcctggtcaacatggcaaaaccatgtctctactaaaaatacaaaaattagctgggtgtcgtggtgcaggcctgtactcccagctactcaagaggctgaggcaggaggatcgcatgaatccgagaggtggaggttacagtgagccaagatcgcaccactgcactttagcctggcaacagagcaagactccatctcaaaaacaaacaaacaaacaaacaaacacagggttttttctacagacatgtcagatattatgttcaacataccaggtgatattaagtctctagatgagctaagatacaagtggtgtttcagagaggacaaaatccaacggctttgaatgaaaagtctgaatctaaaaactgtcatgactgcgcaggcacagtggctcatgcctgtaattccagtactttgagaggtcgaggcaggtggatcacgaggtcaggagtttgagaccagcttgggaacatgctgaaaccccttctctactaaaaatacaaaaattagctgggagtgatggtgggtgcctgtaatccccaatactcgggaggctgaggctggagaattgcttgaaactgggaggtggaggatgcagtgtgccaatatcatgccactgtacttcagcctgggtgacagagcaatactctgactccaaaaaaaaaaaccaaaaaccaaaaactgttatgatgacagcaatagccatgactaacatttttgaatgcttcccactgttctaagtgcttcccatgtcttaagccataaaataacatactgtcccatgaagaaaggtctgtacttggagacaagtgcatcacacatactaggaaaattaccacaaatcaaatagctaaaaatgtcaacacaagcactgaatccagatgtctgggattcacatttgaatataaacgctgaagtaacagatacagctttaaactaaactgacatgggtttatctagtggagagaatgtgacaaaggtccaagggtaagaacacggagcatcctacaaggtcgctgaatggacacacacaggcatacatataatccttcccaatacttcttactttttttttttttgagatggagtctcactctattgcacaggctagagtgcagtggcagaatctcagctcactgcaacctcggccacccaggttcaagcaattctcttgcctcagcctccccaggagctgggatttgaggcacctgccactgcgtccatctaatttttgtatatttagcagagacagggtttcaccatcttagccaggctggtctcgaactcctgacatcgtgatctacctgcctcagccttccaaatgaaaaatagttaaaatcattacaattattataaaaaataaaacttattgcaaatgaaaaatacttaaaatcattacaattattataaaaaataacttattgcaaatgttgtgttttctacataaaccatgggcttatccacccatgtattcatgcacacacatcacatcacggcgttacccacgtggtggcccacctctaatccaagctactggagaggctgaggcaacagaatcactgtaatctgggagtcagaggctacagtgaaacaaaatcaccccactgcactcctgcctggacaacagagactcaactcaaaacaaattaaaaaataaagtaaaatcaatgatgtaagaaagcatcctgtaccactgatgcctatctccactttccactccatcccaagtcattaaaagtgcagagtttggctaagcgtggtggctcaggcctgtaatcccagcactatgggaggctgaggtggatgaatcacaaggtcaggagttcgaccagcctgaccaatacggtgaaaccccatctctactaaaaatacaaaaaattaaacaggcgaggcagcaaatgcctgtaatcccagatactcgggaggctgaggcaaaagaattgcttgaagccagaaggcagaggggcagggagctgagatcccaccactgcaatccaacctgggcaacggagcgagactccatctctaaaaagtaaagagtccagctgggctggctgtctcccatctggaatgccagcaatttgggaggccaaggtgggaggatcactggaggccaggatatcaaggctatagtgagctatgattgcaccactgcactccagcctggacaacaaaataaaaatacgatataaaaaataaggccggacacagtggtgcacacctttaatcccagcactttgggagtccaagacaggcagatcatgaggtcaggagttcgagaccagcctaaccaacatggtgaaaccccgtctcaaataaaaatacaaaaattagctgggtgtggtggtgcatcctgaagtcccagcaactcaggaggctgaggcagaagaattgcttgaaactgggagatggaggttgcagtgagccgagatcattccattgcactccacctttggggactgagcgagactccatcttaaaataagtaaataaatagatagagagatacatatatacatacatacggtgacccatgcctatcactcaggctctttgggaggctaaagcagggattagttgagctcaggagtttgaggctgctgtaaactctgaattgtaccattgtactccagaactaagccacagagcgacaccttctccctctctctctcttttcttttgagacagagtctcactctgtctcccaggctggagtgcagtggcataatttcggcatacagtaacctccacgtcctgggtttaagtgattatcctgcctcagcctcctgagtagatgagattacaggcatgcaccaccaccccaagctaatttttgtacttttagtagaggtggggtttcaccatgttggccaggctggtctcgaactcttgacctcaagtggtcttcctgccttggcctcacaaattgctggtattacaggtgtgagcacctgaaccaacatcctgtctcttaaaaaaaaaaaaagtttggaatcacagacatcttgatctactagtgtggcttcaaatgcattaccaaatcagatacaaaatacctccccttatttgtctccttttccagaatttactagatatctgtgtacactaacatatgtatttcatatgtagtttctctgatctggtccacaaagagctgacatccagatgtggcccctgaacaatccagcctgcccagcagcactgacatcaatgggcccacaccccatgtttatccatgtctaggtgtgagcccttcccaggaccatgcccagtggagcttcttcccaagttcacatcactgggtcacaggagatggaatctcggagcagctgagaggaactaagggcaggcatggctgagtgtgagtgaacgtgtcaggcaaaattcttcaaactcagaaaagactggctgctacaatacctggcatttcagaaaggaaagagacagattaatccacagaggaatatcacttcacctgaggaagagccatgcctggctcctttcctttcctcttctgagctgcttcttcacataacatgagtctttaggaatcaatcctgtatgtgaaaaaaaatgagacttcttgttagaaatgactcactcccatcctgtgacaaaaccacatgaacaggggagacctcacccagcagaaagaagtcccccaccgcccactgcaccagagatcatgcagagataagaaagtcccacaggacgacctataagtgtgtttgaccccggtcttcagatctcactcccctcctggagaagcccccacacactaggcagcagtggggagctgggctggactgatctccccttcagggcacaaacccatccttcatcaatccccatccagaggacagcccctcacctctctgtggatcacaggctgagctcagccctcagaaatggaggacaaagatgctcaatgctgcacacagatgacaagcacctgcgccactgcaggtattactgagggtgggttccatcccatcagaataagaatccctgctaaagcagcacaaaagctctatttgaaaaatgcctctagactctaatgtgaagccagggttgagctccactcagagggggcgagcccagcacagccccacgttctggctctgccctccccttggggccttgttctcaccagcatccagagagtggatgacaaaggcacaaaaataatcacacagaacaggcaacgtggaccagaggtggggtgaatgatgggctgtgtgaaaggaaataaatcttcgagccccaactcactaagcaaaagggagaagtcaagctgggaactgcttagtgagccagactccccttctattcaaagtcacccctctgctccctgacatagatgcatgtctgagtgcctccttcgaaagactaatcagaaactcaaaagaaggacccagcacagtggctcaggactgtaatcccagcactgtgggattacacaggtagatcacttggggtcaagaggtggacaccagccagccaacatggtgaaaccacatgtctactaaaaatacaaaactgatccgggcatctacttgggaagctcaggcaggagaatcacttgaacccaggaggcagaggttgcagtgagccaagactgtgccactgcactccagcctgggtgacaaaaggagacttcatctcaaaaaaaaggaaactcaaaagattgcaaccgtttgtgccacatttctctgtgacctggaagcccactccgtgcttcaagtcttcctgcctttgtttaaagttctcccaccttcccagaccaaatcaatgtacttcttacatatattgattgatgtctcatgtctccataaaatgtataaaattaaactctgcgccgaccaccctgggcaaaataaactttctaaattaactgagatctctgtaagattttctggtttcacagctgcagtgtcaaatgagggctgtgggagatcacaaaggaaacccggagaagatgatatcagaacaaggacctaggaaagaaaggctgcttgtcacttgcagctgaggggaagagagtcctagagagagggacagctcaagtgagggccctgagacaggagcaacctcagccccaggaagaggaaagcgaccagtggggctggaacagtggaagagaggagggcacaggtaggagatgaggtcagagaggtcctgggggcacagacccataggaacatgtcttcaaacatgtttctcccacaaccttaaagaattttgaaagtcgactgtgatcccagctactcgggagtctgaggaaggagaatcccttgatcccaggagtcagaggttgcagtgagctgatatcatggcattgcactccagcctcagccacaagagtgaaaattcctctcaaaaaaacaaacaaacaaacaaaaattggaagtgatgtatcttctcactcttttcacgtatacatctaagtttctctttatattataaattacaacacttacaaataaagtaatttatttcacaaatttaaaatacatgctgtcaagttcggccgtttccggaagtacgtagtcaccctcatctgagatgtgcagactgcaaggaaatgtgtttgggggtttagaaagccactcgtggacacctgaaggtggggatgcctgtttgatgacccaggagacagctgaggagacaactggacacaggattgtagagctcaggggcgaggcctgcaggggacatggagtcatgtaggtgggttaaagctgtgagatgataaggttcaaggtgacttgagtctaattaccccgtttttgttcatcttgtgcttctttttttttttttttaatatttggagaactggaattcatttaaaattcgagttaaaactgagcactaccctctcccagaagaaaagtcacacactgtattttgtcagtcatttcaggggtcagtgtcactgactgagcttttccggtcttattcctcacctctatgttacaggtgggctcactgaggctcacagtgggagacatttcaccaagttattctgagatgttctgaggtgaggaggaaggacgtgtggctgattcccatgtgattgcctggaaggcccaataggctgccttggtcttcctcctctagaaaattccaagaccagccaggattggtggctcacccttgtaatcccagcactttgggtagttgaggcaggccgatcactggagccgagaagtttgagaccaacatgggcaacatataaaccccatctctaccaaaaatacaaaaaattagccaggcatcatggcatgcatctgcggtcccagctacctgggaggctgacgcaagatcacttgagcctgggaggcagaggttgcagtgatccaagattgttccactgcattccagcctaggtgatagggtgacactctatcttaaaaaaaaaaaaaacagcggtcaggcaaggtggctcacacctgtaatctcaacactttgggaggccgaagtgggtggatcacaaggccaggagctcgagaccaacctggccaatatggcaacatcccatctctactaaaaatacacaaattagccaggcgtaggggtgtatgcctgtaatcccagctattcaggatgctgaggcaggagaatcgcttgaccccgggaggcggagtttgcagtgagacgagatcgtgccactgcactccagcctgggtgacagagagtctcaataaataaatatatatatctaaacattagccaggcctcgtggggcgtgcctgtggtcccagctactccggaggctgaggtgggaaaatcacttgagcccaggaggttgccgctgcactgagctgtgatcctgccactgcactccagcctggacagcagtaagagtgtctcaaaaaaataaaaattaaaggctggacgcagcagctcatgcctgtaatcacagcaccttgggaagctgaggcgggaggatcacctgaggtcaggagttcaagaccagcctgaccaagatggagaaaccccgtttctactgaaaatacaaaattagccggccatggtggtgcgtgcctgtaatcataactactcaggaggctgaggcaggagaatcacttgaaccccagaggcgaagtttgtgatgagccaacatcacgccattgcacttcagcctgggcaacaagagcaaaactgcatccaaaaaaaaaaaaccgacaacagcaaaaataagtaaatttaaagtaaaattaaaaaataacaactaatgaggcccagtgtgatggctcacgcctgtaatcccaacacttcgggaggccgaggcgggtggattacgaggtcatgaattcaagaccagcctggccaagatggtgaaaccctgtctctactaaaaatacaaaaatcgacaggacaggtgtggtggcggctggctgtaatcccagctgctcgggaggctgagacagagcactgcttgaacccgagagccggaggttgcagtgagtaaagatcgctccactgcactccagcctgcatgacagagaaagactccatctcaaaaataaaaaataaataaataaataatcacacaaaaaaccaactaaactaatgaagagaggaactagaaaaaaaaattacaaaaagagaacaaaagcacttttaatattcctttcatcacgttccatatagtaacagagactcagtcacttcttactctacttctctccctcactccccaccccatccatgaaaagggaagagggtgatccacaaggaatgagtcaagtcactgtcctctggctgaagaggggttgcagagggaagctgcctctgacgccatcattataaaatgcaccacacttagacacaggagtttggcaactctcattctcatctgtataatttaaactaattttaaatttgttacattataaacagagaaaacaacatgtcatcacttcatcatcacatccaatcaactcaccactcatctgcacccagggtcccccttcgtcttcattacttttcccctccatcattcctttttttgtttgtttgttttgagaccgagtctcgctctgtcgcccaggctggagggcagtggcgcgatctcggctcactgcaagctccgcctcccgggttcatgtcattctcctgcctcagcctccggagcagccgggactacaggcgcccgccaccacgcccggctaatttttagttttcttagtagagacagggtttcaccgtgttagccaggacggtctcaatctcctgacctagtgatccgcccgcctcggcctcccaaagtgctgggattacaagcgtgagccactgcacctggcctcccttcggcattctatacatagctctttctcaccttctctctccatctgtttcttttctgcatttccccctggacttctgctcattttatgcccctctcctgttttgctccattcttttttgttttttgtttgtttgtttgttttttagacggagtttcgctcttgttgcccacgctgaagtccaatggtgcgatctcagctcaccacaacctctgcctcccgggttcaagtgattcttctgcctcagcctcctaatccaaaattagcagggcgtggtggcgcatgccagtaatcccagctactcgggggaagtatcacaagagaatcgcttcaaccctaaaggcagagatagtcattagccaagatcgtgccagtgcactccagcttgggcaaaaagagcaaaactccacctcaaaaaaaaataataataataattagtaggtaggcccggcatggcggctcatccctgtaatcccagtactttgcaaggccaagacaggaggaaactttgagcccaggatcttgagaccagcctgggaaacatactgaaaccctgtttctacaaaaaaacaaacaaacaaagaaaaaaaacaactagctgggcttggtgtctcacacctgtggtctcagctactagagagactgagggaggaggatcgcttgagcctaggaggtcgaggctgcagttagagtagagaacgctattgtaatccagcctgggtgacagagccagaccctgtctcaaaatataaactaattaataaattaaaagtattatgtaataagagaaagtgattttttttcccccacatcactgtcccacttcctaccccaccctgggaaaagggaagagactgactcacaactgaataactgggattccaagtagaagctaacctctgataccaaaatttatagaatgtacatgtctcatagacaggagttttaaaattctaaatctcatctgtataatttaaacaaggtattagatgatatacacagaagtcaacatgtcacaactaatcatatccaatgaactcacccacttatctgtacccaaagtcccccaccctttttttcttttgagacagggtcttgctcttttgaccaggctggagtacagtggcatgatctctgctcacagcagcctggagctcctgggctcaagtgatcctcctgcttcggcctagagaagctgaaactgcaggtgcacactatcacacccggttaaattttttttttccttttttgacagagatggggggagcctcactattttgcccaggctggtcttgaactcctagactcaagcaatccctttgcctcagtctcctaaagtgctgagattacaggcatgagccactgcgcccagcccctctttcttcattactgtgcttccctccctaattctgtgcatatctctcattctccccttctctctctagctcttgttttcttttctttttccctgggattgtgctcctcattttgtacccctctcctctcctgctgtttatccccttcttccctctattacttctcttccacctcttctgctccattctcacagcttatttaacctcttttttttttttcctttttgagatggagtttcactcttgttgtgcaggctggagtgcaccggtgcgatcttggctctcaccgcaacctctgcctcccaggttcaaaggtttctcctgcctcagcctccctagtagctgggattacaggcatgtgcaaccgctcccagctaattttatatttttaatagagacggggtttctccctgttgatcaggctggtctcgaactccggacctcaggtgatccacccgcctcagcctcccaaaatgctgggattacaggcatgacccacagcgcccggtccttatttaacctcttgttgttctttctccccaatctttcaatcttcctcaatgtctatatattacagcctcttctcttatctctccgtctcctctgctctccctattaaattctctcttccctgttatacccctctgtccccactctccagcacctcagatccccaggtgtcctccctgctgtggttctccatctgttcttgccaccagcaccactctgctctgtctgccctggctccaaatccctcctcctctccctcactctggtgagcctccctctttgctgcccctctccctaccttgctgtccttcatctttctgtacatctagcttttctctacatttctccagttgcttttctcctcctgctttcttagttttttttctttcacttttgctgtctcttggcaaattcctaacccatcctctactttgccatctgttatgggcctttctcattcttcttttctctgtctctggttttctactgctctctcagtccctctctctatctcctgatccctttggcccaggcgggtttggagtaatcacaggcgggtttggagtaagacgcctgcatcccgtagaagcgcattttccagggggtggagctggacaggaaagaacacctggtatcataggacaagcccctgcgacccaccccaaccctggctcaggggaagcgaagacttggggagcagcagggcccggcaccaggagggacgtggtgggcgacggcaccctaagacaaaggtgggacctgcaggatcccaggaccaggcagaggacgcagcctccccggggctggggccggggcgccgcgctccaggtgccaactggggcgaggctgggaggcgcccagggctggaatccacctcgcgggtgaggactttaaaaagcacggggcgggaatagtcagaaaaatgttttgagcaggaaaaatacgcgataggaagtgtatacattgccctatagcagaaagaccggggacgggaccagcctccgagcgacttcaaacccaaaagcaagcaacttccagactcttaccgggacgtctcaatttgctctgggtgaagggaagacaggcgagaatttccaggtccgtggggatcccacgtcccaggggcagaagcgccggggacctgggaagtgcagacttaatccaaggcagagcaaaactcacgcgccgtggtaggaccttcactccacgcgatccgcttccgggtttgtgcgcgcccaggactgaagccaggccggggcaggttggctggacctgggcggggtagaggcggggccccaggcggagagaccttgccctttagaaccggcagagggagggcccggggcgggacctgtgcttctcagcctcgcactcagcgcctctgtttttcgagtttttggaggcgacagcggccaggaaggctgaggcatgattcaaaagccctggaattatctggaacgggaatgcaaactagaatgtgaaatgcaaagccctgccagggcggaacatacgatttcatgctgatggcccacagaacagaacagaaatcctctccctttctattctccattcactcaggagggagggtccaccccgtgctcagcttcaaagtgttccctagggcctccgcctgggatgcgggacggagagctcaggccagggaggagtgaggtcaccacctgctgcctaaacacagcagggatgcgggcacgaggcggaagcctgaggtcccagctactcaggaagcagcggcgggagaatccctgaacctgggggtccaggccatcctgggcgacaaagtaacaccccctaactgcagggtcctcttcctgatctctctctcgctcttttactttttttttttttttttttttttgagacggagtctcgctgtgtcgcccaggctggagtgcagtggcacgattttggctcactgcaagctccgcctcccgggttcacgcccttctcctgcctcagcctttcgagtaactggaactacaggagcccgcctaacccaaacaaaaacaagaccgggcgcgctggctcacacctgtaatctcagcactttgggaggctgaggcgggcagatcatgaggtcaggagatcgagaccatcctggctaacacagtgaaaccccatctctactaaaaaatacaaaaaaattagccaagcgtggtggtgggtgcctgtaatcccagctactagggaggctgagacaggagaatggagtgaacccgggaggcggagcgtgcagtgagccaagatcgtgccactgcactccagcctgggcgacagagcgaggctacgtctcaaaaaaaaaaaagaaaaagaaaaagaaaaagaaatatctcccctagtttgtctccttttccagaatttaccagataccagtacacagataccagtgcatacattaatgtatgactttcatacatagattctctgatctgatccacaaagagctaaatgtgcatccagatgtggcccctgaacaatccctgctgcccaatatcactgacaccttggggtccacaccccatctccatccatctctggtgtgagcccttcccaggaccatgcccagtgcagcctcttcccaagctcatgtcactaggttatagaagatggaatttaagtgaagatgacaaggactgagaaaaggcatgggttagtgtgagcaaacgtgtgaggcaggatgcttcagactcacagaagactggctactacaatacctggcatttcagaaaggaaagagacagaagaatccaccgaggaatattactccacctgaggaagagccatccctggctccttttctttgctcctcttggtgtcttcctcacgtaacatgagtctttggaaaatcaatcctgtatgtaaaaaaaaatacgagatttaatttttagaaatcactccctcctttcctgtgacaaaacacacacacaggggagacctcaccagggataaagatggttctctgctgcccactgcaccagagattatgtggagataagaaggtgccacaggaagacctacaagggcaattttgacctgttttgaggtcttgctccctcctgcaaaagtccacacacacgctgcagcaggacacagatcttcagggcacagatctggccctaaccaaaccccatgcagagcacagccccctcacctccctgtggatcacaggctgatctcagctctcaacatggaggaaactgccttgatgttcaatgctggagacagatgagaatcacctgcaccattgtaggtattattgagggtgggtcccatactgtgataatagcaatctctgataaaacagcatagaagctatatttgcaaaatgcctgaaaaccctaatgtgaagccaagtttgagctccactcagggcaccagccccgcagagccccaccttctggctctgctctccgcttggggacttgttcccaccaggatccagtgaacagcgaaggagcaaaaaggatcacacagaacaggcaacatgggccagagatgggggtgaaggtggggctgtcatgtcaaatgggggactgtgggagaacacaaaagttttcatagaaaaagtgatgtcagaacaaagacttagggaagaaaggctgcttgtcacttgcagctgagtggccagagagtcctaggcagagggacagcccaggtgaaggccctgagaaaggagcaacctgagtcccagaaaaagaaaagaagcctgcatggttacagtagaggtagggaggaggacagaggcaggagttgatgtcacagagctcctgggactcagatatctagggatgaggtcttgaaacatttttctctcacatctcaactcaaaagaattttggaaatgtattttctcactcattttatgtatacatgtaactttctcttctatactttgtctctgtgtctctttcttttcaaagtgtctcgttccacctgacgagaaatgcccacaggtgtggaggggcaacccacctcttcaccaatgcaatccatcctgggcaatggagcgagactctatcacaaaaaagtacagagtccagccagggaggctgtctcacacctggaatgccagcaatttgggaggccaacatgggaggatcccttgaggccaggagatcaaggctatggtgaggtatgattgcagcactgtactccagcctggacaacaaaattaaaaaaaatatgaaaaatacggccgtacactttaatgagcattcgtgtgaagagaccaccaaacagcctttgtttgagcaacatggctgtttatttcacctgggtgcaggcgggctgagtccaaaaagagagtcagtgaagggagataggggtggggccgttttataagatttgggtaggtaaaggaaaactacagtcaaagggggtttgttccctggtgggtaggagtgggggtcacaaggtgctcagtgggggagctttttgagccaggatgagccaggagaaggaatttcacaaggtaatgtcatcacttaaggcaaggaccggccatttacacttcttttgtggtggaatgtcatcagttaaggtggggcagggcatattcacttcttttgtgattctttagttacttcaggccatctgggcgtatacgtgcaagtcacaggggatgcgatggcctggcctgggctcagaggcctgacatacatgtgccccacgcctttaattccagcactttaggaggccaagaagggcagatcatgaggtcaggagtttgagaacagcctggccaacatggtgaaaccctatctctactaaaaatacaaaaattttgcaggtgtggtggtgcacacctttagccccagctacttggatggctgaggcagaagaatcgcttgaacccaggaggcagaggttgcagtgagttgagatcgcatcactgcacttcagcttgggcaacagagcgagactccatttcaaaataaataaataaataaataaaacaattacccacatgtggtgacccatgcctatctttcaagctctttgggagtctaaagtcggaattacttgaacctaggagtttcaggctgctgtaaactctaaattgtgcctttgtactctaaaactaagccacagagcaacattatctctctctctctccttttttttttttttttttttttgagatggagtcttgctctgttgcccagcctggagtgcagtggcacaatctcggcttactgtaacctcgacttcccggattcaagtgactctcctgcctcagcctcctgagtagctgagattacaggcatgagccatcactcccaactcatatttttagtagagatgaggtttcaccatgtgggacaggctggtctcaaacccctggcctcaagtgatccacccaccttggactcccaaaatgctgggattacaagtgtgagccaccacacccagaccaacatgctgtctctttaaaaaaaaaagtttgaagtcagagacatgttgatctactagtgtgacttcaaatgcactaccaaatcagatacaaactatctccccttataggtctccttttccagaatttaccagatatctgtgcatattaaagtatatgtttcatatgtggtttctctgatctcatccacaaagagctgacatccagacatggcccctgaacaatgcaggctgtgcagcagcactgacaccacggggcccacaccccatgtccattgatgtctgggtgtgagcccttcccaggaccatgcccagtggagcctcttcccaagttcatgtcactggctcacaggagatggaatctcagagcagctgagaggaactgagggcaggcatgggtgagtgcaagtgaatgtgtcagacaagatgcttcagactcagaaaagactggctgctacaatacctggcatttcagaaatgaaagagacagattaatccaaagaggaatatcacttcacctgaggaagagccatgcctggctcctttcctttcctcttctgagtggcttcctcatgcaacatgagtccttagaaatcaatcctgaatgtgaaaaaaaaaagacttcatgtcagaaatgactcactcccttcctgtgacaaaaacacacaaacaagggagacgtcaccctctggaaagatggtcctttgctgcccactgcaccagagatcatgcagagataagaaagtcccacaggaagacctacaagtgtatgtttgaccctggtcttcagatctcgcccccctcctggaggagcctcccccacgaggcagcagtggggagctgggctggactgatctccccttcagggcacagacccatccctgatcaaaccccatccagaggacagcccctcacctctctgtggatcacaggctgagctcagccctcagaaatggaggactcagagcttcgatgctcaatgctgcacacagatgacaagcacctgcgccactgcaggtattactgagggtgggttccatcccgtcagaataagaatccctgctaaagcggcacaaaagctctatttgaaaaatgcctctagactctaatgtgaagccagggttgagctccactcagagggcgtgagcccagcacagccccacgttcaggctctgccctccccttggggccttcttctcaccaggatccagacagtggatggcaaaggagcaaaaataatcacacagaacaggcaatgtggaccagaggtagggtgagcgttgggctgtgtgaaaggaaataaatctttgagccccaaatcactaagcaaaaaggaaaagtcaagctgggaactgcttagggaaccagactccccttctattcaaagtcacccctctgctccctgacatagatgcatgtctgagtgcctcatccaaaaggctaatcagaaactcaaaagaaggacccagcacagtggttcatgcctgtaatcccagcactgtgggaggctgatgcagtgagctgagatcgtgccactgcactccagcctgggcgacaaaacgagacttcatctcaaaaaatacaaaaaagaaactcaaaagattgcaaccatttgtgcctcatttatctatgacctggaagcaccctcgctgcttcaagtccttctggctttgtttaaagttgtcccgcctttccagaacaaaccaatgtatgtgagccaccatgcccggctcaatcctctttttatttatttatttatttattttatttttgagacggagtttcactctgtcgcccaggctggagtgcagtgttaggatctcggctcactgcaagctccgcctcccagcttcatgccattctcctgcctcagcctcccgagtagctgggactacaggtgcccaccgccacgcccaactaattttttttttgtattgttagtagagacagggtttcaccgtgtttgccaggatggtctcgatctcctgacctcgtgatccacccacctcggcctcccaaagtgctgggattacaggcgtgagccactgcacctggcccggcccaatcctcttaaacactttaacgtcaattaatgctcgaactcaatgttaaatcaactcatcctcaggtcaatgctgagttgactgtaatgtacgccttgatggtttgctatactcagtgcattttgaactattacctcaaaatgtacttcttacgtatactgattgatgtctcacgtctccatgtaatgtataaaattaagctgtgccccgtccaccttgggcacatgtcatcaggacttcctgaggctgtgtcacagatgcgtcctcaaccttcacaaaatacactttctaaattaactgagatctgtctgagattttctcagttcaaagctgcaatgtcaaatgggacagaaaggctgcttatcacttgcagctgaggggctagagagtcccaggcagagggacagctcaagtgaaggccctgggacaggagcaacatcaccctcccaacaaaggaaagcagcccgtgtggctggagcagtggaagagagaagggcacaggtaggagatgaggtcagagaggtcctggggacagagatccatagggttaaggacttcaaacatttttctcccacaacccaaaagcattttgaaagtccactgtgatcccagctactcggggggcagaggtaggagcatcgcttgaacccggaagaaggaggttgcagtgaatcaagattgagccactgaactccagcctgggtgagaagagccaaactctgccacacacacacacacacacacacacacacacacacacacacacacacacacacaaaagtgatgtatcttctcagtcatttcatgtatacgtgtaactttctctttatattataaattacaacatttacaaataaaggaatttatctcccatatttcaaaaacatgctgtcaagtttggctaagtccccagaagtacacagtcaccctcatctgagacgtgtaggactgcaagggaatgtgtttgggggtttaggaagtcacttatggacacgtgaaggtggagatgcctgtttgatgtcccagcagagagctgaggagacaactggacacaggattgtagagctcagtggagaggcctgcaggggacatgggtaggtgggttaaagccctgagatgagataaggaaaagcagtgggtgtggacagagacaagaataagttcaagatgatttgagtctaatcccgtttttccattccggtatttgtgggtttttttacatttttggaggacaggaatccatttaaaattcaaatcacacctgagcatcaccctctcctacaggaaaagccacacacttatttggcaaagtatttcaggggtcagcgtcactctgactgagcttttctggtcttattcctcacctgtacattactggttgagtcactgttgttacgagcaggagacacttcaccaagttatcctgagaagctccgagttgagtcagaaggaggtgtggctgattcccacgtgatggtctggaagcgccaataggctgtgttggtcttccttctctagaaaattccaggatgggccgggcatggcggctcaccctgtaatcccagcactttgggaggctgaagtgggtagaccattgagcccaggaatttgaaaccaacgtgggagacgtggtgaaaccgcgtctctaccaaaagtataaaaaattagccaggtctggtggtgtgcatctgtggtctcagctatttgggaggcggactggggtggatcactgggcctgggagatggaggttgcagtgagccaagattgtgtccctgcactcaagtatgggtgacagagtgacactcttgtctcaaaaaaggaagaaaaaagtttcaggaccattctatatacctgagcaaatgaaatgtctctttcaatgtctaaggttttgatggcatgaatcctaaacataattattttctgagaaaaatgattgtaatacgttcaaaataaacacaattttgaacacatagctataagtgtttaaaacattgaaaaagaagcagcggtacaaatgagatctgagcaaatgttttcgtcatgaacatatgggctctgctggaacaaggttccaggtcaatccagcccatccttcaacatctgcaaagaatattatggaccagaggaacttgaagggaacatttacttaaaagctcacagctcactatttagtcagatgacataaagaaaatggaataataggctacatgaactaaattttgatgttagcataaagaaaaagttccttgatatctttatcaagtacacattgaaacaagctaaaatcatttatcaggtaccagaaaatgtttccaatatatgacacagactagaaagcatgcagtcctcaatgtaaactaaacacaataaatttcagagaaaaacaatttacagtggttaaaaaaatatatatatatataataaaatgtggggtcaaagaaatttttcaatacatatcatagttggaaaacaatgatgtgacttcgtaagattataccaaagcttatttgagaagcagttatttactttatttttattttgttgagatggagtctcaccctgtagcccagctggagtgtaggtgcgccatctcagctcattgcaatgtccgcctcctggattcaagcgattctcctgcctcagcctcctgagtagctgggattacaggcactcgccaccaaaccaagctaatttctatattttagtcaagacgaggattcaccatgttacccaggctgttctcaaataccttgcctctggtgatccgcctgttgtggcctcccaaagtgctgggattacaggtgtgagccacagcacctggcttttttttttttttttaattaagaaacaagccgggcttggtggctcatgactgtaatcccagcactttgggaggccgatgcagctggatcgcctcagccctggagttcgagaccagcttgggcaacatggtgaaagcccatctctactaggaacacaaaaatttgccgggtgcaatggcgcatggctgtggtcccagtgactttggaggctgaaatgggaggatcccttgaacccaggaggttgaagctgcagtgagctctgatgctgtcactgctttcatgcctgggcaacagaatgagacccatctccaataaaaatgacaaaagaggaaacacatgcgtcctgggtctggggacagggggaatctaaggccaattaacacgaacctcaggaggtcctgacgatgtgtgcccaaggtgttgaggctgcagtttactttcacacattttatggacacgagacagcaatcaatacataaaacatatacattgttccggtctggaaaggtggaataactggaattggggggcttccgggtcacaggtagataacaaatgatcacattctttgagtctttgatcagcctttcactaaatacacaatttatatgtgagagcgggaggaggaatagtcacttacgtcttagactggagtacagtggcatgatcacggctccctgcagcctctacctcccaggctcaagccatcctcccaatgcagtctccacagaagctgaaccagcagacatgtgccaccatgcccagctaatttttgtattttttgtggagacaggggtttcaccattctgtccaggctggtcttgaataccggggctcacatgacccagctgtctcaacctctgaaagtgctggtattacaggcctgagccactgcatctggtctcatcgcaaatttgatatttcttcttgtttcaattttagcagaatttacattgctttgattgagtctcttttcaaactgattttacccttctgagtgcctcaaactagaccctgttcagacatgttataacagatttgtaccattttattttggtgcaaaaaatgtgacatcatgcacaattttctcataacatgtattttttcatgaacttcgtgaagaccccttgtactagcaaactgtattcaagaggatataaaaaggattgtagatatgcaagtgccacttatttctgagatacaaggatggttcaacatattcaagcaaatcaatgtgatataccacttgaacataatgaaagatgaaaaccacatcatctcaatacatgtagaaaaagcatttcacaaaattcaacatcatcatggaaatcctaccaaaaatagttagagaaggaaatttacctcaacagtacaaagacaatccatgaaacgaccacagtggaaataaacaatcagggaaaatggaatgcttttcctgtaggatctcacatgatgcaagaatgctctcaccctttctattcaatcaatgctggctgtcccagccagaacaatgaaatagcaatagaaatcgaactcatccaaatcagaaagaaagaagtcaaattttatttgtttgtagatgacatgatctgtgaagaaaatcacagtcaaccaaaatacaactggaactaataaacatattcagtgtatttgcagaatagaataatagcaccaaaaattagttgaatttccatacattaacattaaataattttaaaataaaattaaaaaccacttccatttgctaaagagcttaaagtaagaaatatttaggaataaacatataaaggtgagaagtttgtaccttgaaatctacaaacattgatcaaaatgattaaaaacatataaatacacatacaatccatactgattggaaaaattagtattgctcaatgattatataaccgaatgtgatttagattcaacacaatactcatagaaatccccataactttttgttaaagaaacaaaaaacaggccagtcacggtggctcacgcccataatctcagcacttcgggaggtagaggtgggtgaatcataagatcagaaaatcgagaccatccaggctaacacagcgaaacccagtctctactaaaaatacaaaaaattatccaggtgtggtggcatgcacctgtagtcccagctagtcaggagactgaggcaggaggatcgcttgaacctgggaggcggaggttgtagtgagtcaagatcatgccactgcactccaacctggatgacagagcaagagactccatctcaaaaacaaaaacaaaaaaaagaaaaaagaaagaaagaatagaaatgaaaacacaggctgggaaaagtggctcccgtctgttggccaggctgttctcaaactcttaacctccagtgacctaccagtcttggcctctcaaagtgctggcattgcaggcgtgagccacagtgcccagcccagtcctcttaacataaacagtttaatgtcaattaatgcttaaactcaatgttaagtcaactcaaactcaggtcagtgctcatttaactgtaatgtcaattaatgcttgatggcttgctatactaatggcatttgaaacaactgtctccaaaaggaattgtctgatggtctgcaaggagtgatctcggactgaagaccttaccacactgatgacatttgtaagatttctgtccagcatggattctctgatgtctattgaggtgtgaatgtgaagtaaacgctttgccacaatcatcacacttgtgagtttctctcctgtatgaatcctcctatgttttgcataggatgaaacttgactgaagaccttgccacaatcatgacatttataaggtttctctccagcatgagttcgatgatgaatagcaatatatgaacgatatctgaaaaatctgtcacatttattacacttgtaagatctctcattatggattctccaatgatttgcaatggttgtagcattactgaaaactttgtgacaatcattatattagtcaagtttccctatactatggattgcttgatggtgaataagtggtgactgcccactaaaggctttgccacactcattgcacttgtaaggtttctctccagtgtgaattctagtatggtgtgccaggtgtgaatcactcccaaaagccttgttacaaaccttacatttgtatgttttttctccagtatgaattctcctgtctttcaagctgtgatttgtgactgacaactttgtcacagtcttcacatttgtaagatttctctgcagtatgaagactatgatgacttgcaaggtgtgactgttgattaaaaactatgccacattcattacacttgtagggtttctctccaatacgaattgccttttgaattacaaggtatgaattttgaccaaaggtgttgccacactcatcacatttgtaaggtttctctccagtttgaattctaatatgttttgccaggtatgaattatattcaaaaatcttgtcataaaccttacatctgtgtggtttctcttcagcatgcattttcttatgtgtttcaaggtttgatttgcaaccgaaaactttgtcacattcttcctatttgtaaagtttctctgcagtatgaattctatgatgacgtgcaagggttgttttttgattaaaaaccttgccacattcattacacttgtaaagtttctctccagtatgaatggctttgtgacttacaagggttgaattgtgatggaaggtgttgccacactcattacacttttaaggtttctctccactatgaagtctatgatggtatacaaggtttgacatctgactgaaggtcttgccacactcattacactttcaaggtttctctccactatgaagtctatgatggtatacaaggtttgacatctgactgaaggtcttgccacactcattacacttgtaaggtttctctccagtatgaactctctgatgctgtgcaaggtgtgcttgttgattaaaaaccttgccacattcattacacttgtaaggtttctctccactatgaagcctatgatggtatacgagggatgacatctgactgaaggtcttgccacactcattacacttgtaaggtttctctccagtatgaagcctacgatggattataagcgatgatgtctgacggaaggtcttgccacactcattacacttgtaaggtttctctccagtatgaactctctgatgttgtgccaggtgtgaatccctccggaaagccttgtcacaaaccttacatttgtacggtttctctccagtatgaatcctcctatgtctttccatgtgtgatttgcgactgaaaactttctcacattcttcacatttgtacggtttctctgcagtatgaagtttatgatgacatgcaaggtttgcttttgtactaaaaaccttgccacattcattacacatgtatggtttctctccagtatgaactctctgatgttctgtaaggcatgaatcactccggaaagccttgtcacaaaccttacatttgtatggtttctctccagtatgaatcctcctatgtctttcaaggtgtgatttgcacctgaaaactttgtcacattcttcacatttgtatggtttctctgcagtatgaagtctatgatggcgtgcaagagttgattgttgattaaaaaccttgccacattcattacacttgtaaggcttctctccagtgtgaattatactatgttttgccaggtatgaattatatgcaaaagccttgtcacaaaccttacatttgtatggtttctctccagtatgaatcctcttatgtctttcaagatgtgatttgcgactgaaaactttttcacattcttcacattcataaggtttctctccagtatgaagcctacgatggcgtgcaagggttgacagtcgattaaaaaccttgccacattcattacacttgtaaggtttctctccagtgtgaattatagtatgttttgctaggtatgaattacatgtgaaagctttgtcacaaaccttacatttgtatggtttccctccagtataaattatcttatgtgtttcaaggtgtgatttgcgactgaaaactttgtcacattcttcacattcataaggtttgtctgcagtatgaagcgccttgtgaaggaagagggatgtattgtgaccaaagatcttgccacactcattacacttgtaaggtttctcatcaatgtgagatctacgatggcatgcaaggtatcgcttctgattaaataccttgccatatacatcacatttacattgtttctcttctaagtgggttatctgatgtttttttaaaagtgagctacaattaaaggatttgccactctcaatacattggaaagatttttctctcatgtgtacattccgtttttgtgtgagtaatgaagaatggagggaattatttccatacttattagaaatatgggttttgggcctacaacaaattctttgggatgttgaaactgaggaagcattgttgatagacttctcaacttgattaccaattttcccttcaggctgaaatatgtgcagttcaggcagatgcgaatgaaagcttaatccaagctgatctttaatatgcttgtttccagcatgcctttgatcatgttggcctgtactaccagtcaactctttgatttctgtcatgggtgctgcatggtcatttgtttcatcttctttccactgaaactggaagccatgaatgtctttctcaattttctggaagcaaaaatctccaatgtgatgacttgcttgtctttgcaatgtccctgtgtggaacgcttctgtattgccttgccctgttgagaagaatgtcttcatcatgcatttggaagagatatctacaaaatataaacaccaataggtttccaatgaagtacagatggtgtataatactgaaatgtgtaaatatgacacaaaaaacaatacttattttaaacttcccaaacatgatcttcaaagtttaagaacacaaaaggagtaagattctttaataaataaagggcgattatatgtctttcaaatcaattccatgaaagtctatttcctatatcatgacaaaacactgacagggcacaaacatgtgtgagcctaaagtaaggagtgtttttccactgtgaccctaaagtgtatcacactttgcaaaaaacacatcactatcacatcaaaaaaagaaaaatatatattcttcatatttacagcgtatttagtgtatacaaataaatgctaaagaaccacacaatatactatattggtaaataatccaaaacaagctgttgtaaggataaccaaaatcaatggaaattctgtattgtcaaacaatcatagcactgacaagataacaaaagattataaaaattagccaggtatggtggcccgtgcctgtactcacagctactctgaaggctgtgtcacaagaattgcgttaagccaaaggcaaaggttgctgtaagccaatattacaccactgcactccagcccaggtgacaaaatgagcctccatctcaaaaaaacaaaaaaacaaacaacaaaaaaaggcagggcatggtggctcatgcctgtaatcccagtacttctagagggcaaggcaggcagatcacctcacgtcaggagtttgaccagcctggccaatgtggcaaaaccccatctgtactgaaaatacaaaaagtagctggcatggtcacaggtgcctgtaatcccagctacttgggaggctgagtcaggataatcgcttgaacttgggaggcaaagattgtggtgagttgagatcgcaccactgcactccaccctggatgacagagtgagactccatctcaaaaaaaggaaaatgttaataccatatttttccaaataactgttacaaaattacctatatccatgtggaacaggcacgttgtgactttttttttttttttttgcgacgaaatcttgctctgtcgcccaggctggagtgcagtggcatgatctcggctcactgcaagctccacctcccgggttcacgccattctcctgcctcagcctccccagcagcttggactacaggcacacaccgccatgtccagctaacttttttgtatttttagtagagacagggtttcactgtgttagccaggatggtctcgatctcctgaccttgtgatccccttgcctcagcctcccaaagtgctgggattataggcatgagccaccgcacacggccgacttttaaaaaaaattttatgtatttttatttttttgagatacagtgtcactctgtcacccaggctggagtgcaatggtatgatcttggctcaatgcaacctctgccttggggttcatgtgagtctcttccttaggttctgagcacctgggaatgcaggcacatgccactgtgcccggctaatttttgtatttttagtagagatggggtttggtgaaacctgttggccaggctggtctcgaactcctgacctcagatgatccacacatctcagcctcccaagacctgggattacaggcatgagccactgcaccctgtggcactttgtgacattatctaggggagtgtcagttatattgcataccacataccgaaaactcacatataaagtcataaaaatcaattaatcaaatattgcaacccatgataaaacaagcaagaaaataacaagtagatttatacagactgaagaattctaaacaattccctcttaagaaaaaagccaaaacttgtacttaccaccagcacacaacataagaactgaaatagatgttaagatcactactttctgatatatgaggtcaagaaagtatacagcattataaagaatgagaattgactaacagccaggcacggtggcgcatgcctgtaatcccagcactttggtaggctgaggcaggtaaatcaggagttcgagaccagcctgggcaacatggtgaaaccccatctctactaaaaatacaaaaaaattagctgggtgtggtggagggtgcctgtaatcccaggtacttggtagtctgaggcagaaaacatttgtacccagaaggtgaaggttgcagtgagctgagatcatgccactgcattccagcctgggcaacaggatgagactccatctcaaaaaaataaaataagataaataactacttctcaaataagctttggtagatgtggtattctctaataggatgttcctgcagatgcagaccttgagagaatttagcatgggtgtcgactactcatgaataggactagtgcatttatagagacattaaagagcgtgttgcctgttcctcttttcactgtattaggacacagcaggaatatggctggtctaaagcatgaagaaggctgtcaccaggaaccaatttggctggcaccttgctcttggatttcccactttccaaattcatgagaaatcaatgtctttgtcttaagcctcccagtttaagcaatttccttttttgtttgtttttgagatggagtcatgctctatcacccaggctggagtgtagtggcatgattctcctacctcaagtgattctccctcctcagcccagtcttactctgtctcccggtctggagtagagtagcgtgatcttggcgcactgcaacctccacctcctgggttccagtgattctcctgcctcaacctcccaagtagctgggattacaggcgcacgccaccatacacagctaatttttgcatttttagtagagacagggtttcaccatattggccaggcttgtctcaaactcgtgacctcaagtgatcaaccgatcgcagtctcccaaagtgccaggattacaggtgtgagccactgcacctagcccatttttggcatttagtaaattcgaggtttcaccatgttggccagactggtctcaaactcctgacctcaagcgatctacccaccttggtctctgaaagtgctgggattagaaaagtgagacatcacagctggccagtctaagctatttctaacaggacagtgaaatgacagagacaggagaaagagcatctcatcatcaacatcaccaaaggctgacaaatcttattaaacaaaggaagttaagagtctgtactgtaaaacttgcaatacttgaagccatctaatagcactaacatgttttaaaaaacttgagacaggccaggtgcggtggctcatgccagtaatcccagcattttgggaggctgaggtgggaggatcacaaggtcaggagattgagaccatcctgcctaacaagctgaaattctgtctctactaaaaaaatacaaaaaattagcccgcggtgttggcactcacctgtagtcccagctacttggaaggctgaggcaggagaattgcttgaacctgggaagtggaggttgcagtgagccgaggtgacaccactgcactttagcctgggtgacagaccgaaaatctgtctcaaagaaaaaaaaaaaagaaatgaaagaaggctaaagagtaactccaacccacaagcatatataaagttctccaggcctggtgtggtggttcacgccaataatcccagcactttgggaggctgaggctggcagatcaccaggtcaggagattgagactatcctggccaaccaacatggtggaaccccatctctactaaaaatacaaaacttagctgggtgtagtggtgcacacttgtagttgcagctactcgggaggctgaggaaggagaattgcttgaacccagaaggtggaggttgcagtgagcagagatcacaccactgcactccggcctgggcgacagagtgagactccatctcaaaaataataataataaaaataaataaataaataaataaataaagttctccagtaaaggtagtaaaaacagataggccaagcatcgtggttcatgcctgtaatcccaacactttgggaggatgagctgggcagatcacctgaggtcaggagttcgagtccagcctggccaacaaaaagaaacagtctctactaaaaatacaaaattagatgggtgtggtggtgcatatctgtaatcccagcttctcaggggcctgaggcaggagaatcggttgtacccgagaggcagaggttgcagtgagctgagatcgcagcatcgtacttcagcctgggtgacaacagcaaaactcagtctcataaatacataaagtaattaattaataaaaggacagatacagaaactggcatatgtataccttcataactaaacttttttcatatttaaaataaaaggcatgaaaaacactgtacatatatgttaacaaaaatgcaacatacacagaaataattctgacaaataaaaaaatgttctagtggagaagaagaagtcatttttgcaggttacagaattttttttttcttcttttgaaacagagtttcactctgtctcccatgctggagtgcaacggtgcgatctcggctcactgcaacctctgccttccagattcaagtggctctcctgcctcagcctcctgagtagcttggattacagccacccaccacggcgcctggctaatttttgtaactttagtagagacgaagtttcaacatgttaaccaggctagttttgaactcctgacttcaggtgatatgcccatctcagcctctcaaagtgctgggattacaggtgtcagccactgcacacgtccaggttatggtaattttaagtttctttattatgctataactttaatatgtttaacatacctgcaacaataacctctgcccaaatatctaaagaactacaagacaaaactatttaaaataataacaatggttaggcatggcagctcatgcctacggtcccagtgttttgggaatctgaggcaagtgggtcacttgagatcagaagtttgaaaccagcctggccaacatggtgaaacactgtctctactaaaaacacaaaaattagctgggcatggtggtgagcgcctgcagttccagctactcaggaatctggggcataagcatcctttgagcccaggaggcagaggctgcagttagccaagatcgtaccagtgcactgtagcctgggcaacagagtgagactctgtcataaaaaaagagagaaagaaagaatagaaagaaagagcagagagataagcgggggcaaagaaagatatcttttcagagatgtgaggatttaaacttttcttttgccacagaattctcccacttgcagagagtttccccacacactatttgaaggtggagcttccactctgcccatctgagctcttacctgcgtttgcacctgtaatacattcccacccatctggatttttttgttattttcacttaactctccacagtccagggctctttcccttgctccaacatggagacagcaggtcagaaagagactcctgcttataaaaagaaaggaccataacatgctggagcttttctagagtcccagccctatgtttctgtaggaaagaagacattacagatgaatctaggaaaatatttcacaaattcctccactgactgcctcattctgaatgcttggggagcactgtaatatgtagtatgtggacatcgagctctcttccaagaactacagaatcgaaagcacaggagaagcaaacagggaactggatatctttaaagtctgccataaggtttgtttttgtctttgttttttgagacagagtcttgctctgtcgtccgggctggagtgcagtggtgtgttctcagctcaatgcaaaacttggcctcctgggttcaagtaattctctttcctcagcctctctaggagctgggattacacatatgcatcaccatgcccggctaacttttgtatttttagtacagacagggtttctgcatgttggccatgctggttttgaactcctcacccatagcgatccacacgccttggcctcccaaggtgctgggataacaggcgtgagccaccacgaccaggctgccataaagttttatgcctactttacttctggaagctccactgagctatcatgaagaatgcagaacctctaaacaaaggggacagtgaaagtccagatgctacatcatgaagcttttcatttcaaaatcaatacggcttccattttagtcaagtaaggatgtggctcccaagaggcaacaagagaaaatacaaagatacacaagggcacatccccaggaggttatcctcacccagggagaccaggttcctataattctccagcatcacatccctgtaaagagtcctctgagcagggtccaggcatttccactcctcctgagagaattctatggccacgtccctgaatgtcaatagaccctgaaatggaaacacattttaaccaaatggttatggtggagttcttatctttacagaaaatgacaagagagggggaaagcatggatttagttgtagtgaatgttctcacaaatccgagtgacggatttttcaccacatgatgtttttattatactttttgaagtgatcaagacacactttcagtatgaaattcctaagtttgtgaaaaattcaagaaataaataaaaaatcagtgttggattcctgttataaaaatgtttgaaacttttatagacacaccaagtgacattcattatctagatgagagagagcatgactgatgtcttaaaagatgacaatgtccacagtaagagacaggctgggcacagtgacacatgtctgtaatcccagctacgcaggaggctgaggcagaattgcctgatcctgggaggcagaggttgcagagatcccagacagtgtcactgcactccagcctgggcaacagaaactccatctcaaaaaaaaaaaaattaaaaaaaaaaacaaaaaacattagctggacctggtggcaggcacctgcggtcccagctacttggaaggctaaggagggaggatggcttgaccctgagggtggaggttgcagtgagctgtgatcccaccagggcactcaagcctgggcaacaaaccgagaccccatctcaaaataaaataaaatacgtgaaaacaaaattactcaaagtacaaaaatcaattgtgtttctaaattttcacaaaataataaaacctagagactcacaaaacactagatgtgaatacaaagggttgtcatttgtcccagattttcaaaatataaaagattttcaaaatatatacagatgtgtgtatatatgtatttgtatgtatatgtgtgtgcatgtgtgtggggatatatatgtacatatatgaagttttaaaaaatataaaaagtagcaagttttgtttaactgaagaggaatctcatcttgctggaaaaggacacttgggcagttgcgggcagggggaatcttgtcagatctaagaaaatggaaatgccccatcctagaagaagcaatcaccctttcaactgcctgacctggaggaatgttcagatatctgtagtaatgcggacgtgcacagaggcagccactatggcactctttatacagggaaaagttgcaaaggacacatgtgttgtcattcagccaatttccaatgcagatgtcaaagagcaagctagccatgtttactaacatgacaacatgtaaattcacaactagcaggatgaaatatcgaactaaaatatttactggaacacaaagaagaaaatagacactggcgtctacttgagggtggagggtgggaggaaggagagaaacagaaaacataactattatgggcctggcgcggtggctcacgcctgtaatcccagcactttaagaggtcaaggcgggtgaataaccaggtcaagagttcaagaccagcatggccaagataatgaaagcccttctctactaaaaatacaaaaaatagccagacgtggtgttggctgcctgtaatctcagctactcgagaggctgaggcagcaaaacgctttaacccaggaggagggggttgcagtgagctgagatcatgccacttcactgcagcctgggtgacagagcgaaaaaaaaggagcccagtctgagcggcgaaggcggcggcggcggcggtggcggtggtggcagtagcactgggcctgcgggcggtccgggatccaggccggggcggcgccatcttgtgcccggggccggtggggaggccggggaggttgccccggggggcgcaggggacgatgggaacggcctggagtctgaggaactggagcctgaggagctgctgttggagccggagcccgaagaggagccgctccagccccgcgccccatgcctgggagctccaggacctgggcctcgttcaggagccaccggcagccaagaggagggggaggagccgggactggtcgagggtgacccggggctggaagctatcgaagctggagtcagggaggtggaggaagaagctgagaagctaaaggagctacagaacgacgtagagaagcagaggaatatgagtctacctccaggcaatgctggcccagtgatcacgtccattgaggagaagatggaggctgatgcccgttccatcaatgctggcaatgtggactgcggtgcaacagcagaagagctggaagctcactttcatggctgtggttcagtcaaccacgttaccatactctgtgacaaatttagtggccatcccaaagggtttgcatatatagagttctcaaagagtcagtgaggacttccttggccttggatgagtccctatttagaggaaggcaaatcaaggtgatcccaaagcgaaccaacagaccaggcatcagcacaacagaccggggtcttccacgagcccgctaccgcgcccgaccaccaactacagcagttcctgctctccattctacagtggttttaacagcaggctctggggtcgcgtctacaggggccgggctagagcgacatcacggtattccccttactaaaaaaaatgtgtattaggagagagaggaaaaaaagaggaaagaaggggaaaaaaaaagaataaaaaaaaacccaaaaaaaacagaagatgaccttgatggaaaaaaatatatatatatttttaaaaaaagagtccctctccctctccctctccccctccccctccccctccccctccccctccccctccccctccctctccctctccctccacagtctccctctgatgccgagccaaagctggacggtactgctgccatctcggctcactgcaacctccctgcctgattctcctgcctcagcctgccgagtgcctgcgattgcaggcacgcgccgccacgcctgactggttttcgtttttttttttggtggagacggggtttcgctgtgttggctgggctggtctccagctcctaaccacgagtgatccgccagcctcggcctcccgaggtgccgggattgcagatggagtctcgttcactcagtgctcaatggtgcccaggctggagtgcagcggcgtgatctcggctcactacaacctccacctcccagccgcctgccttggcctcccaaagagccgagattgcagcctctgcccggccgccaccccgtctgggaagtgaggagcgactctgcctggccgcccattgtctgggatgtgaggagcccctctgcctggctgcccagtctggaaagtgaggagcgtctctgcccggccgccatcccatctaggaagcgaggagcgcctcttccccgccgccatcccatctaggaagtgaggagcgtctctgcccggccgcccatcgtctgagatgtggggagcacctctgccccaccgccctgtctgggatgtgaggagcgcctctgctgggccgcaaccctgtctgggaggtgaggagcgtctctgcccggccgccccgtctgagaagtgaggaaaccctctgcctggcaaccgccccgtctgagaagtgaggagcccctccgtccggcaaccaccccgtctgggaagtgaggagcgtctccgcccggcagccgccccgtccgggagggaggtcgggggggtcagccccccgcccggccagccgccccgtccgggaggtgaggggctcctctgcccggccgcccctactgggaagtgaggacccctctgcccggccagccgccccgtccgggagggaggtgggggggacagccccccgcccggccagccgccctatccaggaggtgaggggcgcctctgcccggccgcccctactgggaagtgaggagcccctctgcctggccagccgccccgtccgggagggaggtgggggggacagccccccgcccggccagccgccctatccaggaggtgaggggcgcctctgcccggccgcccctactgggaagtgaggagcccctctgcctggccagccgccccgtccgggagggtggtgggggggtcagccccccgcccggccagccgccccatctgggaggtgaggggcgcttctgcccggccgcccctactgggaagtgaggagcccctctgcccggccacgaccccgtctgggaggtgtgcccagcggctcattgagaacgggccatgatgacaatggcggttttgtggaatagaaaggcgggaagggtggggaagaaattgagaaatcggatgattgccgggtctgtgtggatagaagtagacatgggagacttttcattttgttctgtactaagaaaaatacttctgccttgggatcctgttgatctgtgaccttatccccaaccctgtgctctctgaaacatgtgctgtgtccactcagggttaaatggattaagggcggtgcaagatgtgctttgttaaacagatgcttgaaggcagcatgctccttaagagtcatcaccactccctaatctcaagtacccagggacacaaacactgcggaaggccgcagggacctctgcctaggaaaaccagagacctttgttcacttgtttatctgctgaccttccctccactattgtcctatgaccctgccaaatccccctctgcgagaaacacccaagaatgatcaataaaaaaaaaaaaaaaaaaaaaaaaagttttaagtgtgctgtgtagagagtggcatgcttggatgacataaactgggcaagcctttgaggaaatgcatcaccctgattactatagttttaaggctacttaaaaggtccctatgtccaaagaataccctctctgctcactggatagcaggtgaaattccacaatctgagcttcaatccttgaggttaatgcttagtaataaagttaaactaaactatcacccaatttaagcaatttatacattgtgaaaagagaacaatgcaactcagatgaaattttcctaaatctccagttgtggtaatcttggttaatgctttattgtcactataccaatacttttgcatgtatttaaaatgacgctactcatagtaattgcttatctgctcagtggagcaatttaggactacccagcagtcttttaaaaccttggcatttatgaagattaaaaacttgaatggtgaaaaaaaaaaaaaaaaaaaaaagacatactgtggaaggacagagaatccctaacaaactgctgaggagggacctgttttggggagcaggggaaggcccagggagtggggcagggggcggcttattcactctggggattcgccatggacacgtctcaacagtgcaagctgctccccgtgtttccctgccccacttcgcccccgtaggggctgctccagggtaggcgggcgggggtggtaggaggtttttttttttacccagggctctggaaggacaccagactgttcggcttgtcaccttccctccgtcttctcctcacctttcacagtcccctcctgcctgctcctgtccctccaggtctaccacccaccccacccctcttctctggccccctgcccctccagattgcctggtgatctattttgtttccttttgtgtttctttttctgtgttgagtgtctttgtttacaggtttctgcagccagaagatctccgttccgctcccagcagctccactgtaaattccccttccccatggggaaatgcactaccttgttttggggggtttagaggtgtttctgtttttcagttttttgttttgttttgtcttcctttgccttttttcccttttatttggagggaataggaggaagtgggaacagggaggtgggagatggactctgtttatttttttaagctcatttccaggggtgggaattttttttaatatgtgtcatgaataaagttgtttttgaaaataaaaattgtttggacttttacaaaaaagaaaaaacttttttaagttactacagaatttcttctaaagcctcataatgctgcagaaatacacgtgtacaagacttgctctgacacctggcacagaactgacagtaacggctccccagggaggctggaaggaggatggaggacgtgacagggaaaggagatgctttatggccaagggtctaagctgcagctttcttggagcgttaccaccaaacaaatatacacatcgtgtgatgtttaaatataaccatatatatttaataacaattggtggggctgggcatgatggctcgtgtctgtaatcccagcattctgtgaggctgaagcaggcggatcacctgaggtcaggagttcaagaccagcatggccaaaatggtgaaacaccgtctctcctaaaaatacaaaaaaaattagccacgggtgatggcacgtgactataatcccagctacttaggaggctaaaacaggagaatcacttgaacctgggaggcagaggctgcagtgatccgacatcacaccactgcattccagcctggacaaccgagactttgtctcaaaaagaaaaaaaaaagctgggcgaggtggctcacgcctgtgatttcaaaactttgggaggctgaggtgggcagatcacgaggttaggaaatgaaaaccatcctggctaaaaaggtgaaaccccatcactactgaaaataccaaaaaattatctggacatggtggcactcgcttgtattcccagttactcaggagcctgaggcaggagactcgcttgaaccaggaaggcagaggctacagtgagccaagatcacaccactgcgctccagcctgggcaacagagccagaccttgtctcaaaataaaataaatatatgaaaacagaattactcaaagtacgaaaatctttttttgcatatatatgccccaaaaataataaaaccttcaaagactcacaagaaattagatgttaataacaaagtggtcattttccccagactttcaaagtatacatgtgtgtatatatgtatgtatatgtatagatatgtgtgtatgtgtgtgtatatatatatttatatatatatataaaggtttttaaaatataaaaagtagcaagatttgtttaaccgaagaggaatcttgccttggtggaaaggatactttggcagtgggaggaaggagaggagcagaaaaaataactattgggcccgggcacagtggctcacacctgtaatctcagcactttgggaggctgaggctgctggatcacctgaagacaggagttcaacatcagcctggccaacatggtgaaactcttgtctctattaaaaatacaaaaattagccaggtatagtggcaagcacctgtagtcccagctactcgagagtctgaagcaggagacacacttgaacccgggaggtagaggttgcagtgagccgagatcatgccataatactccagtctgggcaacaagatcataactcagtctcaaaaaaataaataaaaaaaataactgtctgggcgtggtggctcacgcctgtaatcccagcactttgggaggccgaggcgggcgaatcatgaggtcaggagatcgagaccatcctggctaccacaatgaaaccccatctctactaaaaatacaaaaaaattagctgggtgtggtggcaggtgcctgtggtcccagctactcgggaggctgaggcaggagaatggtgtgaacccaggaggcggagcttgcagtgagccgagattgcaccactgcactccagcctgggcgacagagcgaggctccatctcaaaaaaaataaataactatcgtgtactggccttgacaacggtgtgatgaaataattggtacaacaaactccaatgacgtgagtttgcctctgtaacaaaccttcacatgtagccccaaacgtaaagtaaaaaaaaatacataaaaatttttctttaatttacaacagaattttttttaaagtctcataatgatgcagaaatacacgtgtacgagactcgctctgacagctaacacagaactgacaatagtggctcgccagtgaggctggaaggagggtggaggatgtgacagggaaaggagatgccttatggcaaagggtctaagctgcagctttgcttggagttttaccacaaaatatatacatcatgtgatgtttacatataaccatttatattcaataataattgttggggctgggcatggtggcttgcacctgtaatcccaacactcttgggggctgaggcaggcagaccacctgaggttaggagttcgaggccagcctggccaacatggtgaaaccctgtttctactaaaaatacaaaaaaattagccaggcaagccgggcgcggtggctcaagcctgtaatcccagcactttgggaggctgaggtgggaggataacgaggtcaggagattgagaccatcctggctaacacggtgaaaccccgtctctactaaaaacacaaaaaattagctaggcatggtggcgggtgcctgtagtcccagctacttgggaggctgaggcaggagaatggcatgaacccaggaggcagagcttgcagtgagccaagatcataccaaagcactccaccctgggtgacagagtgaaaacatcatctcaaaaaaagaaaaaaaaaattagttggggatggtggcgcgcacctataatcccagctactaggtgggttgagacagagaatcgcttcaacctgggagacagaggttgtagtaagctgagatcatgccactgcactgcagcctgggcaacaaagcaagactccgtttcagaaaataataataataataataataataataataataataaaacgtggaatgagaatacagctttatcctcttagataaaaaagcagtactctccaatattagagaaaaattgcaaccacttttaccaaaaacacctgtttcacaagcctctccacagtaacaccatagtctccgtgagctcgatgtgttaagaatggttgaatgactctcctgctattatttacattgatttcatgttcttaaaataatgaaggaataggccaggaacggtggctcacgcttgtaatcccagcactttaggaagccaaagtaggcggatcgcctgaggtcgggagtttgagaccagcctgatcaacatggagaaacctcgtctctactaaaaatacaaaattagctgagcatggtggcgcatgcttgtaatgccagctactcgggaggctgaggcaggagaatctcttgaacccaggaggcggaggttgcggtgagctgagatcacgccattgcactccagcctggataacaagagtgaaactccgcttcaaaaaaaataataataatgaaggaatcattaatgtattattcatctatgtatgaacattccattctaattagtaagatttttggagtcagaaacacaggaactcactcaattacctaaaaatgtggtataaaatcagggagaaaagattttcccttattggtctccttttctagaattgaccacgtactttgtgcacattaatacttgactcccattggcagctgctctaatcctggtccacagagagctgacagtgcatccagatgtggcccctgaacaaaccctgctgcccaacagcactgacaccacgggaccctcaccccgtctccatccatgtctgggtgtgagaccttcccaggaccatgcccagtgcagcctctcccatgttcatgtcactgggtcaccagagatggaatctaagcgagatgagatgaactgaaggaaggcatgggtgagggtgagcaaacatatcaggcaggacacttcagactcagagaagactcccaactccaaggcccagcgtttctgaaaggaaggagacagagcaatccaccgagaataccatctcacctgaggaagagccatccctgactcctttgctttcctcttcctcttctgggtttcttcctcacgtaccaagattctttagaagtcaatcctgaatgttaaaaatatgttgtttattgctcagaatcaacacatcccctccctgtaacacaacaacacatacaaaggagacttcaccttgaggaaatatggtcccctatgctgcctaccgcaccacgaacaaaaaattcctacaggaaaactcccactctactcctggagaagcccacacacacgctgcagcagtggggagctgggctgggatgagctccccttcaggaaatctctaccataaatacaaaaacttagccagatatggtggtgcgcatctgtgtgtctgtggtcccagctacttaggaagctgaggtggaaggatcacttgagctcagaagttcgagaccagcctggccaacatggagaaaccctctctctactaaaaatataaaaattgggctgggctcagtggctcatgcctgtaataccaacactctgaaaggccgaggtgggtggattacttgaggtcaggagttcaagagcagcctggccaacatggtgaaaccctgtctctactaaaaatacaaaaagtagccgggcttgatgcgcatctgtaatcccagctactcaggaggctgaggtagaattgcttgaacctggaaggtggaggttgcagtgacccaagatcgcgccactccactcctgcctgggtgacagagtaagactcaaaaataaaaaaatacaaatacaaatacaaaaattagcagggtgtggtggcacacacctgtaatcttagctacttgggaggctgaggcacaagaatcacttgaacccaggagatacaggttgcagtgagccaagatcacaagactgcactcatagcctggaggacagaatgagagtctgtttgggaaaaaaaaaaaaaaaaaaagtgcatttctgatgggactgacacagagataagaagacttgagtaatgtgatagacactgatgggcagagggaacttcagatgggggtgggagggcatgggagacagctctgagcctagatctgaaggagaaagggacagtgccatcttcatttagaaacattgaataagaacagggacaacaacctgagacaggaaggattttgatgtttgaaaaaagagaaaagcaaatgtgactggggcagagggagtcagatgagggtaagctcccaggaggaggctggacactggcagggaccctgaacacagggctgtggagccaaagtgaagagttgggcttttgtcctggggaacacgggaagcaggtggagggttccctgccaggcactgacatgacctgctttagatgtagctgtgatattctaatacagacaaagtcctccgaagatggtctctctttctgagtctaccactctctttcttccattctattgcttttttttttcatttttggggtactgcatcccactgaaaattctaattacaactgggcactcccctctaccagaaaaaaagccacacccagacacccactctattttgccaatcatttcagtggccagggtcactcgggttgagcttttctggtctagcccctcatctccaagttgcaggggaggctcactggggctcagagctggaaacattttcacgaagttaccctgagaaggtctgagatgagtgagaaggtgtgcctgaattcttacatgggggcctggaagggctaatgggatggactggtcttatcatcccatccttaaaattagagaagcatctttcacatgcctgggttaaagaaaattcttttgaaaggttctgatgaaattgactcccaacattgaattcttccttacaagaaaatcacactaacatttataaaatgcagcagtgtaaacacacagctcttgaccttgaaaacagggtcaactgtagaactaagacataagcaaattatttcaatcaagaatacatgggtggacagctgaggtggttcacacctgtaattccagcactttgggaggtggaggtgggtggattacctgaggtcaggagtttgagaccaacctggccaacatggtgaaaccctatctctactagaaatacaaaaattagctgggctccatccttgcaacttatttaacctcttttttttttttttttttttgagacggagtctcgctctgtcgtccaggccggactgcggactgcagtggcgcaatctcggctcactgcaagctctgcttcccgggttcacgccattctcctgcctcagcctcccgagtagctgggactacaggcgcccgccaccgcgcccggctaattttttgtatttttagtagagacggggtttcaccttgttagccaggatggtctcgatctcctgacctcatgatccacccgcctcggcctcccaaagtgctgggattacaggcgtgagccaccgcgcccggcccttatttaacctcttgttggtccttctccccaatctttagatcgtcctcaatctccatagatttccacctcttctcccctctctgctctccctgttaaattctctcttctctgttataaccccctggacccagtctggcaccccagatccccaggtgtcctccccgctgtgcttctccctctgttctccttgccaccagcaccactctgctctgtctgacccggctccacatccctcctcctctccctcactctgatgagcctccacatttctgcccctctccctaccttgctgtctgtccttcatctctctgtacatctagcttttctctacatttctccagttgcttttctcctcctgctttcttatcttttatcacttttgctgtctcttggcaaatccctcaccatcctctactttgccatctgttatgggtctttctcattcttcttttctctgtctcaggttttctactgctctcttagtccctctctctgtctcctgatccctttggcccacacgatcacacgagggtttggagtaagacacctgcatctcggagaagcgcattttcccagagctggagctgggcgggcaagaacaccccgcgtcacaggacaagccccaggcacctctccaacgcgggctcaggggaagcggtgactgcggaggggagatctggggagcagcagggcccagcaagaggaggagggaggtggggagcgacgacgccttcggacaagggtgggatccgcaggatcccaggaccacagaacgcagccttcccgggactggggtcgccgcgctgtgctccaggaacccaggaggatgaggctgggaggcgcacagggtgggaatacacctctagggtgaggactttaaaaagagccgtgcggaaggagtcaaaaaaaggttttgagcaggaaaactacgagataggaagtgtatacattgccctgtagcagaaagacccgggacgggaccagcctcagggcgactttaaacctaaaaagaaggggcttccggactcccagtagaacatctccatttgctctgagtgaacgaagaaaggggagaacttccaggtctagggggaccccacatcccatgtacagaagtgccggggacctgggaagctcagacttaacaccacacagagcaaaactcaccgcccgccgcggcgtcaccgtcattccacgggatccgcttcctggtctgcgcgaatctgcgcgcgcaggacagaaaccaggcctgggtggagccaacgaggaggcgagcggggcccgggtgaggtgtgggcggggcgcgaagcggcgagaccttgccctttagaacccgcagagggcggggccggagcgggacctgtgagtctcagcctcctcccaggccatgttctcaggcttttgaacccgggagatacagcttgcattgggccgagatcgagccactgcacaccagcctgggcaacagagccagactccgtctctaaaaaaaaataaaaaaataaaaaaataataaaaaaaaaatttgcttgtgcgagacagggatacaacattactcttttccgtgtggatatccagttagttgtcccagcacatttgtaaaagagatctattactttctcctttttatttacatttttttcttttctttttcccttttttttttttttttttttgaggctatttctctgtcgccctggctggagtgcagtggcgagatcttgactcactgcagcctctgcctcctgggttgaagcgattcttctgcctcagcctccggagtagctggcactacaggcacacccaccatgcccggttaatttttgtattttgtgtagagacaggatttcgccatgttggacaggctggtctcgaactcctgacttcaagtgatccgactgccttggcctccccaagtgctgggattacaggcctgagccactgtgcctggcccaggaaatactctttactttgctttttaaatgttgagaaaatacaactgaaaactaaaaaatcttccccgaaatgagaaatcatcttcatgacaaaacaggaagaaataagaactattctattaatgaataagccttagaccagaatgtgttgggaaatagaggcaaacagctaagaggttgaaaagagagaaagaaacttcattgttctatgcaacccgttaagtacatgttttcaagataaacactaatcagtcctcagggaagattagttgacaacagccttggtcgcacatagttcatcctggctgtacttggtaatggaggtgactatctgtgtcagctagttagcttcatgcagagagaggggaattactttaacccacgtctttttgacaagtgtgagttttacaacatggaggcaggtgccgtctctagtgaggctgctacagtccgacagaaactgacgtcagcagtaaataataaaatttagaatacataattaactatagagtttattggaacacaaagcttgaggatagccacctggaaacgtcaactccaaatgaagggggcccgtgttcccaagtagagacgttaaggtttcacacacagggaaagacagagaagctttaccagaatcacattttccattcaaggccagtgcataggctgcagcaaattgattggttatggattgatacacttcaaggaaggttactttatcactccataagaagggacaatgatgccaacaggttagtcttcctaattatttacaggtaaactttttttaaaatttatattaggaaactaaattttattgcactttttgttttgttttgttttggtttggtttttggtacggagtcttgctctgttgcccaggctggagtgcagtggtgcaatcttggctcactgtgacctccatctcccgggttcaagcagctctcctgcctcagcctcctgagtagctgggattacaggcacacgccaccatgcctggctaatgcttttgtattttcagtagacacggggtttcaccatgttggccaggctggtttctaattcctgacctcaagtgatccacccaccttagcctcccaaagtgctgagactacaggcgtgcgccaccgcacctggccagtaaaactcttagaagttgcgcctgcacaccactggactcaggttgcatgaccacgttcctctcaaagctcagaattatttaaatgtccgtagctttaaatttgaaatatttgatgtttgaattatttaacttcctactgagatataggtactatcgcccttgtagtttgccttacaaggatcgttcccaagaccttcagaaatacatccttgggtcattaaactgaaaaaaggcttagttactttctaaaaaataccacttcaggccaggcgcggtggttcaagcctgtaatcccagcgttttggaaggccgaggaggacagatggcctgaggtcggaagttggagaccggcctgaccaatatggagaaaccccatctctcctataaatacaaaaattagcctggcctgttggcatgtgcctctattcccagctactcgggaggctgagggaggtgaatcgcttgagcccaggagacacggaggttgtggtgagccaagatcacgccattgcactccagcccaggcaacaacagtgaaactccgtctcaaaaacaaaaaataaataataataataataataataataaatatggccggcgcagtggctcatgcctgagtgagactccgtctcaaaacaaaataaaacaaaacaaaacaaaaaacaaaaaaaacacattaccagttccacagtagggtgtcctcaaaaacaaaggaaatgcctcctctttaagtttttcttacataggcatccaggtaaatacaaagatatgtctacctgccggttggctgacagtctaacacaacttattactttgttgatttaaagctatccatgactggtcgcggtggctcatgcctgcaatcccggcactttgggtggccgaggtgggcagatcacctgaggtcaggactgtgaaaccagcctggccaacagggtaaaaccccatctctactaaagatacaaaaattagcgaggtgtggtggtgcgcgcctgtagtcccagatactcaagaggatgagacagaagaatcaattgaacctgggaggcagaggttgcagtgagctgagattgtgccactgcactccagcctgggtgacatagagagactccatctcaaaaaaaagaaataactaactttaaagacgaaaataaagaaaaatctggagaggtctcaggaatctctagccagtctgattggagagtgttcttcctcactgaagtcagacaccaaaaaccgtgaaagctggctgatttctgaactgctgaagttccaacagaacataaccagatatacaaagagataacgtggatgatcccaagaaattatacacaaatttataaaacagagacttagaaataacgggactaaaaattcaaaataagcctgggcaacatgttgaaaccatgtttctaccaaaaatacaaaaattagctggacacggtggtgcacacctgtagttccagctacttgggaggctgagatgggaggattgcttgagcctgaaatgcagaggctgcagggcacatggtgctctctcatgttctcagagagggcgcttttacacctgggggtagggatggaatcttcccagatctaagaaatgaggaaatgccacgtcctagaagaagcaatcagtttctcaatagcccctcctgcaggaaccctccagatacatgtagcgaagtcagcacactcacaggcagccagtgtggcattcttggtaacagtgacaaactgggaaggactcacgtgtcttcattcagaaaatgctccaaggagaatgaaaaacagtaagctatcttgcttcctaccttgaaaacatggaatattttaagacttgcaggataaaataccacaacaaaacatttatcatgttgagctcagtggctcacgcatgtaatcccagtacttgggaggccgaggagggaggatcacttgaggccaggagtctaagaccagcctggccaatatggagaaactccatctctactaaaaatataacaattagccaagcatgatggcacatacctgtaacacagctactcagttggctgaggctagagaatcatttgaacccatgaagcagaggttgcaatgtgctagtaagttccagcctgttgacagggtgagacaccggtctcacaaaacatacaaaacaaaaaacaacaacaaaaaaatcatttggccgggcacagtggctcatgcctgtaatcccagcacttcgggaggctgagggggatggatcactagaagccaggagtgccagaccaccctggccaacatggtgaaactccatctctattaaaaatacaaaaaacttatccaggcatagtggcacacacctttagtcccaggtattcaggaggctgaggcacaagaatcacttgaacctggaggaaagagtctgcagtgaggcaagattgcgccactgcgctccagtctgggtgacaggcacattcatcaaataattttatctaaaatctcataatggtgtctgaatacatttctgtaggacttacgctgacttgccacagtactctcagcagtgattccccattgagccaagggaactggtggaaggctggacaggaaaggggatgcctaagtgaactttctttgtccgggagtggttgctcaacgcctgtaatcctagcactttgggaggccgatttcttgttttaaaagcaataatagaacaaattatcctctaccactgatgttacctccactttccattccattctaagtcattaaaagtgcagagtcaaaactgggaattgcggcaaatgcttgtaatcccagcattttgggagtccaagatggatggatcacctgagttcagaggtctgagaccagcctgaccaatgtggtgaaaccctgtttctactaaaagtacaaaacttagcgctgggtgggctggctcacacctgtaatcccagcactttgggaggatgaggtggaaagatcatgaggtcaggattttgaaagcagcctggccaacaaggcaaaaccccatctctactaaaaatacaaatattagctgggtgtgatggtgcatgcctgtagtcccagctactcagaaggttgaggtaggagaattgcttgaacccgggaggcagaggttgcagtgagccgagaccacaccaatgcactccagcctgggtgacagaatgaggctccatctcaaaaaacaaacaaacaaaaactcagctgggcctggtggtgcacacctgtagtcccagctacttgggaggctgagccaggagaactgcttgaacccaggaggtggagggtgcagtgagctgacagatattgtgccactgccatccagcctggcgacagagcaagactccattctcacccacctaaaaaagaaaaaaaagtgcagagtccagccaggctggctgtctcatatctgttatctcagcaatttgggaggctgaaatgggaggctgaaatgggaagatcacttgaggccaggagctcaaagctatagtgagctttgactataccaccgtactcctgcctggacaaaatagcaagatcccatagccacataataaaaaatgaaagacttagccagatatggtgacacatgcctgtcatcctagctccttgggagggtaatgtgtggatcacttgagaccaggagttcgaggctgctataaactagaattgtaccattgcactccagactgggccatagagcaaaaccctgtctctaaaaacaaaaaaaaaaaaagaaaaaaagaaaattggcttcaaatgcattacaaaatcagaaacaaaatatctccctttattggtctcctttccagaatgcacaagatatcagtgcacattaatgtatggctttcatatgtagtttctgggatccagtccacaaagagctaaacgtgcatccaaatgtggtgcctgaacaatcccagctgccccgcagcactgacaccatggggcccataccccatctccatccatgtctggtgtgagcccttcccaagaccatgcccagtgcagcctctatggaaattcacgtcactgagttatagaagaaggatttttttttttttttgagatggagtcttgcggtgtctgctcactgcaagttccgcctcccaggttcatgccatttttctgcctcagcctcccgagtagctgggactacaggcacccgccaccacgcctggctaatttttttgtatttttagtagagacagggtttcaccatgttagccaggatggtctcgatctcctgacctcatgatccacccgcctcagcctcccaaagtgctgggataacaggcgtgagccaccgcgcccggcctagaagatggaatttaagcgaagatgagagggaatgacagaaggcatgggtgagtgcgagcaaacgtgtcacgcaggacgcttcagactcagaaaagactggctactgtaatacctggcttttcagaaagaaaggagacaggataatccacaaggaatatcaagtatatccatgcaaaacaggcactttgtgattttttttaattttctgtatttttatttttttgagacaaagtcttgctctgtcacccaggctggagtaaaatggcgcgatctcacctaaatgcaacctccgcctcctgagttccagcaattctcctgcctcagcctcctgagtagctgggattacaggcatgctccaccatgcatggctaattgttgcatttttagtagagataaggtttcaccatgtaggccaggctggtctcgaactcctgacctcaagtgatccacccacctcaaccccccaaagtcctaggattacaggcatgaggcactgcacccggtggcactttgtgacattaacaagtgaagtgccatttgaacccgggaggcagaagttgcgctgagccgagatcatgcaattgcactccagcctgggtaacagggagagactttctctcaaaaaagaaaagaagaaatgactaacagtgtcagagggctcaattacgatgttacaactacagttaaataacagccaggccatacagcaattctatatatacgcatttcccttagttatctagttcaccatgcataagatataaaacatagaatgtgtactgggaaaattgataaactgggatcagagaaaacattgtataaaacaaattgtacaacaaaaacattaaaaaaatgatgcaggctccctggtctgaatgtttgtattggccaaaagccatgttcagagttcttattctccaataggatgttcctgcagattcggcctttcagataatttgatcatgggtgttgactactcatgaataagaccagtgcctttatttttatttttatttctttatttatttttttgagacggggtctccccctgtcacccaggctggaatgctgtggcaggatctcggctgaatgcaagctctgcctcccagattcacgccattctcctgcctcagactcccgagtagctgggaacacaggcgcctgccaccacgcctggctaattttgtttctgtatttttagtagagatggggtttcaccatgccagccaggatggtcttcatctcctgaccttgtgattcacccgcctcggcctcccaaagtgctgggatcacaggcgtgagccacctcactcagccttatttttatttttttctttttttattttattttattttattttattttattttattttattttattttactttaagttttagggtacatgtgcacattgtgcaggttagttacatatgtatacatgtgccatgctggtgcgctgcacccactaactcgtcatctagcattaggtatctctcccaatgctatccctcccccctcccccctatttttttctttatttttgagaaagagtttcactcttattgcccaggctagagtgcaatggcctgatcttggctcactgtaacctctgcctcctgggttcaagtgattctcctgtctcagcctcctgtgtagctgggatttcaggcatgtgccaccacactcagctaattttgtatttgtagtagagatggggttttaccatgttggccaggctggtctcgaactcctgacctcaggtgatctgcccgtctcggccgcccaaagtactgggattacaggcttgagccaccgcacccggccatccattgttttgtgttcagtagattcgaggattcaccatgttggactgactggtctcaaactcctcgcctcaagcgatctacccccctcagcctcccaaagtgctgggattagaggtgtgagccaccatggccagccagtctaagctgtttctgacaggacagtgaaatgacggagacaggaaaaggagcatgtcatcatcaacatcgctgaaggctgacaactcttattacacaaaggcagtttacagcctgtcatataaaagctgcaatgtgtgaagccatctaatagcactaacttgtttaaaaacctggaggcagctgggaacggtggctcatgcttgtaatcccaacactttggaagaccgcagtgggtggatcacctgaagttgggagtttgagagcagtctgactgacatggaaaaaccccgtctctacttcaaatacaaaattagctgggtgtgttggtgcatgcctgtaatcccagctacttgggagcctcaggcaggagaatagcttgaacctgcgggcagaggctggagtgagctgaggttgcaccactgcagtccagcgtgggcaacaagagcgaaactccatctcaaaaaacaaacaaacaaaaaatctggagaaaaattaacattatttctcaaataagttctcaaataagtacagcaggcccacagtgttcacgtacatgaccccaatttgcacatacagtaagtgagggacaaacttgatcctgggcctgaaggatcccacgacatgtttctaagcacaatagtccaccaagaaagtacagaaaacaaccagtcacaaaaaatacaaggagaacagaaagaagtacatcaagggggatacaaggactgagctgggacacaagcgctgagctgcgctgctgacagtggttctgaagccatccctcatggatcatgtgctgagtcatgatgccctgcacacactgatttaagcagcctcctataattttgtccagtggatgaataaggtcttgacttactcagggagagtagtgttggaggggaggggctcacggggaaattggggtgttcacttttacaaagtcaataggctggtatttgcatccagatcaatgtatcatgtgaggcaaggccaggaaaggaagggcaagggtggagagcaggaagtaatgggcatgtaggagtgaactttgtgcatgcacatctgtgggaatataattccaccaggatagaccaaatcttgagctcggaggaaagtggaactaatttagcaaatggtaaaacattgacccaagcttaaatatgcaaattacaatacaggcaagggacaagaatgaacgagatccaaaaaagcagcagtatggtgacctgaggtgaaagcagttttacgtctcttaaattaaatggcctctgatacctagtttcaagcatatactcaacaatatgccttgtatagattccagaatttcatacacacacacaaaatgagtaaagtctacgaggagtgcagcaatgaaggagaccatggatgtgaagaattccctggctgagtaggtagagatgtgtctgtggaaacagagacagactgagcgcagtggctcatgcctgtaataacaatcataataataatgacaggttttttctgttttctctttttttgagatggagtgtcactctattgctcaggctggagtgcagtggtgtgatctcggctcactgcaacccctgccacccaggtttaagcaattctcttgcctcagcctcccgagtagctgggataacaggcgcctgccaccaggcctggctaaaagtttgtatttatttttgtttttttgtttttttgtttttttttgagacagagtcttggtctgtctcccaggctggagtgcaatggtgcgatctcggctcactgcaagctccacctcccagattcacgccactctcctgcctcagcctcccaagtagctgggactacaggtgcccgccaccacgcccagctaattttttttgtatttttattagagatggggtttcaccgtgttagccaggatggtctcgatctcccgacctcatgatctgcccacctcggcctcccaaagtgctgggattacaggcatgtgccactgctcccatcctaaattttgtatttttagtagatacagggtttccccattttggtcaggctggtcttgaactcctgagcacccgactcagcctcccaaagtgctgggattacaggcataagccaccatgcccagccccttcttactattaactcattattgtgatagttgacaacaatgaaaaatcttaaaatcattacaattattataaaaaataaaacaatgcaaatgttgtgttttctacataaaccatgggcttatccatccacgtattcatgcacacacatcacatcacagtgtaatcccagctactcgagaggctcaggcaaaagaatcgctgtaatccaggaagcggaggctacagtgagaaaatatctcactactgcactccagcctgagtgacagattgaaactgaactaacaaaaaaataagtaaaatcaatgatgtgataaagcatcctgtaccactgatgtgtatcttcactttccattcctttccgagtcattaaaactgcagagacaggccgggcacggtggctcaggcttgtaatcccagcactttgggaggctaaggtgaaaaaacacaaggtcaggagttcctgaccagcctgaccaatatggtgaaatctcatctctactaagaatacagaaaaattagtcaggcaaggtggcacatgcctgtaatcccagccactcgggaggctaaggcagaagaattgcttgaacccaggaggcagatgttgcagtcagctgagatcccatcactgcactccagcttgggcaatagagcgagactccatctcaaaataaataaataaataaaacaattagccgcttgtggtgacacatgcctatcattcaagctctttgggaggctgaagtggggattacttgagccaaggagtttcaggctgctgtaaactctaaattgtgccattgtactccagaactaagctacagagcgacattttctctctctctctccttttttttcttttgagatggagtcttgccctgttgcctaggctggagtgcagtggcacaatcttggcttactgtaacctccacctcccggattcaagtgattctcctgcctcagcctcctgagtggctgagattacaggcatgagccacgacttccagctaatttttgtatttttattagagatgaggttttaccacatgggccaggctggtctcaaactcctgacctcaagtgatccacctgccttggctcccaaagtgctgggattacaggcataagccaccacacccagaccaacatcctgtctactagtgtgccttcaaatgcattaagaaattggatacaaaatgtctccccttattggtctccttttccagaatttaccagatatctgtgcacattaatgtatgtatttcatatgtagtttctctgatctggtccacgaagagctgacatccagacatgacccttgaacaatccaggttgcccagcagcactgacaccatggggcccacaccctgtgtccatccatgtctaggtgtgaggccttcccaggaccatgcccagtggaacctcttctcaagttcatgtcactgggtcacaggagatggaatctcagagcaggtgagaggaactgagggcaggcatgggtgagtgtgagtgaacctgtcaggcaaaatgcttcagactcagaaatgactggctactaaatacctggtgtttcagaaaggaaagagacagattaatccaaagaggaatatcacttcacctgaggaagagccatgcctggctcctttcctttcctcttctgagctgcttcctcatgtaacatgagtctttagaaatcaatcctgtacgtgaaaaaagtatgaaacttcacgtagaaatgactcactcccttcctgtgacaaaaacacacagacaggggagatgtcaccctgtagaaagatggtcctctgaggcccactgcaccagagatcatgcagagataagaaagtcccaccggaagacctacaagtgtatgtttgaccccagtcttcagatctcgcccccctcctggagaagccaccacacacgaggcagcagtggggagctgggctggactgatctcctcttcagggcacacactcatccctgatcaaaccccatccagaggacaacccctcacttctctgtggatcacaggctgagctcagcccccagaaatggaggactcagagcttcgatgctcaatgctgcacacagatgacaagcaactgcgccactgcaggtattactgagggtgggttccatcccatcagaataagaatccctgctaaagcagcacaaaagctctatttgcaaaatgcctctagactctaatgtgaagccagggttgagctccactcagagggggtgagcccagcacagccccacattctggctctgccctccccttggggccttgttctcaccaggatccagacagtggatgacaaaggcacaaaaataatcacacagaacaggcaacgtggacgagaggtggggtgaatgatgggctgtgtgaaaggaaataaatctgtgagcccccaaatcattaagcaaaaggcaaaagtcaagctgggaactgcttagggaaccagactccccttctattcaaagtcacccctctgctccctgatatagatgcatgtctgagtgcctccttcaaaaggctaatcagaaactcaaaagaagggcccagcacagtggctcatgcctgtaatcccagcactgtgggaggctgatgcagtgagctgagatcataccactgcactccagcctgggcaacaaaatgagacttcatctcaaaaaaacaaaacaaaacaaaacaaaaacttaaaagattgcaaccatctgtgcctcatttatctgtgacctggaagtcacctccctgcttgaacctgggagaaggaggttgcagtgaatcgagatctatagggtccagccctttggggcttagtgggtgttctccccatgtgcagagacaagagattgtaataaataaagacagaagacaaagagataaagagaaaacagctgggcccgggggaccactaccatcaagacgtggagaccagcagtggccccaaatggctgggcgcgccgatatttattgcatacaagacaagggggcagggtaaggagggtgaatcttctaagtgattgataaggtgaagcaaatcatgtgatcacaggacagggggcccttccctcttaggtagccgaagcagagagagaaggcagcatacgtcagcgttttcttctatgcacttataagaaagatcaaagacttcaagactttcactattccttctaccgctatctactacgaacttcaaagaggagccaggagtacgggaggagcatgaaagtggacaaggagcatgaccattgaagcacagcaccacagggaggggtttaggcctccggatgactgcgggcaggcctggatactatccagccttccacgagaagctggtggagcagagtgttccctgactcctccaaggaaaggagaccccctttcgtggtcagctaagtaacaggtgccttcccagacactggcgttaccgcttgaccaaggacccctcaagcggcccttatgcgggcgtgacagaggcctcacctcttgccttctaggtcacttctcaccatgtcccttcagcacctgaccctatacctgccggttattcctaggttatattagtaatgcaacaaagagtaatattaaaagctaatgattaataatgtttataataatgattgataattgtccatgatcatctctatatctaatttgtattatgactattcttattctaactattttctctattatactgaaacagtttgtgccttcagtctcttgcctcagcagctgggtgatcctccacccacagagataaagccctgcactacagcctgggcgagaagagccaaactccaacacacacacaaagaaagaatttcagaagtgatgtatcttctcagtcctttcatgtatacatgcaaatttctctttacattacaaattacaacacttacaaataaagtaatttatttcccatatttaaaatacatgctgtcaagttcggctaagtttccggacgtacacagtcaccctcatctgagatgtgcagactgcaagggaatgtgtttgggggtttaggaagtcacttttggacatgtgaaggtggagatgcctgtttgatgtcccagcagagaggtgagcagacaactgcacacaggattgtagagctcagtggagaggcctgcaggggacatgggtaggtgggttaaagctgtgagatgagataaggaaaagcagtgggtgtggacagagacaagaataggttcaagacaatttgagtcaaatctcttgttttttccattccggtatttttgttttttacatttttgtaggacaggaatctattaaaaattcaaattacacctgagcatcaccctctcctaaaggaaaagccacaaactatttgacaaagtatttcaggggtcagtgtcactctgactgagcttttctggtctcattcctcacctgtacattactggttgagtcactgttgtttcgagcaggagatacttcaccaaaagtacaaaaaattagccaggcgtggtggtgtgcatctgtggtctcagccatttaagaactgactggggtggatatttgggcctgggaggcagaggttgcgttaagccaagatcgtgtcactgcatgcaagtatgggtgaccgagtgacaccctgtctcaaaaaaagaaagaaaaaaaaacattccaggacaattttatacacctgagcaaatgaaatgtctctttcaatgtctaaggtcctgatggcatgaatcctaaacatgtaattattttcccagaaaaatgacagtagtacattcaaaatacacacaactgtgaacccctagctataggtgtttaaaacactgaaagagaagcagcattacaaatgagatctgaacaaatgttttcttcttgaacacacgggctttgctggaacaaggttccaagtcaattctgcccatccttgaacatctgcaaaaaatattatggaccagaggaacttgaggggaacgtttacttagcagctcacagctcaccattttatcaggtgacataaagaaagaaaatggaataataggctacttcaactaaattttgatgttagcataaagaaaaagttccttgatatctttatcaagtacacattgaaacaaactaaaatcatttatcaggtaccagaaaatgtttccaatgtatgatacagactagaaagcatgccgtcctcaatgtaaactgaacacaataaatttcagagaaaaacagttttaaaatggttaaaaaatatatctaatgaaatgtggggtcatagaagaatattttgaacacatattatagttgcaaaacaatgatgttacctcataagattatatcaaagcttttttgagaagcagtattttatttattttattttttttattttatttgagacagagtcttgctgtggcccagctggactgcagttgtgcgatctcggctcactgcaacctctgcttccaaaatgaaagccattcttctaccagcctcccgagtagctgtgttacaggcactcgccacaccaagctaattcctacattttagtcaacattgtcttgtcccaacttaaaatgacttatgcatttacaaaacagtgatttctttggggcatcgcccccataaccttttcataaagcattaatgatttcattgttcctctacccaaatttcaccatattcattttttgagacactgtctgtctctgtcacccatgctggagtacagtggcatgatcacggctccctacagcctctaactcccaggctcaagccatcctcccactgcagtctccacagaagctgaaccagcaggcatgtgccaccatgcctagctaatttatgtattttttgtagagaagggggtttcaacattctgcccaggctggtcttgaataccggggctcacgtgacccacctgtctcggcctctgaaagtgcttggattacaggcctgagccactgcatctgctctcatcataaatttgatgtttcttcttgtttcaattttagcaaaatttacactgctttcttttttcaaactcatgtcttccccttctgagtgcctcaaactagaccctgttcagacatgttataacagatttgtgccagtttattttggtgcagaaaatgtgacatcatgtgcaattttcacataatatgtatttttttcatgaacttcttgaagaccccttgtactagcgaactgtattcaagaggatattaaaaggattgtagatatgcaagtgccacttatttctgggatgcaaggatggttcaacatagtcaagcaaatcaatgtgatataccacttgaacacaatgaaagatgaaaaccacatcatctcaatacatggagaaaaagcatttcacaaaagtcaacatcaagtcatcatagaaatcccacacaaaatagatacagaagaaaatttacctcagcaatacaaagaccatccatgaaatgaccacagcagaaataaccaatcagggaaaacggaatgcttttcctgtaggatctcacatgatgcaagaatgctctcaccccttctattcaatcaatactggctgtcctagccagaacaatgaaatagcaaaagaaatcaaactcatccaaatcagaaagaaagaagtcaaattttatttgtttgtagatgacatgaccttctgtaaagaaaatcacaaagagtcagccaaaatgcaactggaactaacaaacacattcagtttatttgcagaatagaataacagcaccaaaaattagttgaatttccatacattaacaataaataattttaaaagaaaattaaaaaccaattccatttgctaaagaacttaaagtaagaaatatttaggaataaacataaaaagtgaggtttgtaccttgaaatctataaacattgatcaaaatgattaaaaacatgtataaatagatataaatcccatactgattggaaaaatgaatatcgctcaatgattatatactcaattgtgatttagattcggtacaatactcatagaagtctctataactttttgttaaagaaacaaaaaacaggccaggcacagtggctcactcctgtaatctcagcactttgggaggtggagtcgggtggatcataaagtcagaagatagagaccattctggctaacacggtgaaacccagtctctactaaaaacacaaaaaattacccaggtgtggtggcacacaactgtagtgtcagctacttgggagactgaggcaggagaattgcttgaacctgggaggaggaggttgcagtgagctgagatcgtgccactgcactccaacctgggcgacagagcaagactccatctcaaaaaaaaaacaagaaaaagaaaataaaggctgggaaaagtagctcccatctgttggctaggctgttctcaaactcgtgagctccagtgacctacctgtctttgcctctcaaagtgctggaattacaggcatgagccatggcccccagtgcaatcctcttaacataaacagtttaatggcaattaatgcttgaaatcaatgttaaatcaacaaactcaggtcaaggctgatttgactctaatgtcaattaatgcttgatggtttgctatactcactgcatttgaaacaactgtctccaaaaggaattgtctgatggtctgcaaggagtgaccttggactgaagacccttccacactgatgacatttgtaagatttctgtccagcatggattctctgatgtctaatgaggtgtgaatgtgaagtaaacgctttgccacaatcatcacacttgtgaggtttctctcctgtatgaatcctcctatgttttgcataggatgaagcttgactgaagaccttgcctcaatcatgacatttataaggtttctctccagcatgagttcaccagtgaaatgcaaggcatgaacgatgtctgaaaaatttgccacatttattacacttgtaagatctcttcactgtggattctccaatgatgtgcaatggttgtagcattactgaaaactttgtgacaatcattacattagtcaagtttccctataccatggattgcttgatggtgaataagtggtgactgcccactaaagggtttgccacactcattgcacttgtaaggtttctctccagtgtgaattctagtatggggtgccacgtgtgaatcattcccgaaagccttgtcacaaaccttacatttctatggcttttctccagtgtgaattctcctatgtatttgaagctggatttgtgaatgaaaactttgtcacattgttcacgtttgtaagatttctatgcagtatgaagtctatgatgacttgcaaggtgtgattgttgattaaaaaccatgtcacattcattgtgcttgtaaggtttctctccactatgaattacaaggtgtgaattttgaccttttaattacaaggtgtgaattttgaccaacggtcttgccacactcattacacttataatgagtttctctccagtgtgaattctagtatgttttgccagatatgcattatatgcaaaaaccttgtcacaaaccttacctctgtatggtttctcttcaatgtgaattttcttatgtgttttaaggtttgatttacaactgaaaacttttgtcacattcctcccatttgtaaggtttctctccagtatgaagtctatggtgatgtgcaaaggttgctttttgattaaaaaccttgccacattcattatgcttgtaaggtttctctccagtatgaattgccttatgacttacagggttgaattgtgatggaaggtcttgccacactcattacactattaaggcttctctccactatgaagcctatgatggtatacaagggatgacatctgactgaaggtcttgccacactcattacacttgtaaggtttctctccagtatgaagcctacgatggattataagcgatgatgtctgaccgaaggtcttgccacactcattacacttgtaaggtttctctccagtatgaactctctgatgttgtgccaggtgtgaatccctctggaaagccttgtcacaaaccttacatttgtatggtttctctccagtatgaatcctcctgtgtctttccaggtttgatttgcgactgaaaactttgcaacattcttcacatttgtaaggtttctctccactatgaatcctcctatgtctttcaaggtgtgatttgcgactgaaaactttgtcacactcttcacatttgtaaggtttctctccagtatgaagtctatgatggcgtgcaagggttgatagtcgattaaaaactttgccacattcattacatgtgtaaggtttctctccagtgtgaagtatagtatgttttgccagatatgaattatatgcgaaagcctcatcacaaaccttacatttgtatggtttctctccagtatgaatcctcttatgtctttcaaggtgtgatttgcgactgaaaactttgtcacattcttcacattcataaggtttctctccagtatgaagcgctttgtgaatgaagagggatgaattatgaccaaaggtcttgccacactcattacacttgtaaggtttctcaccagtgtgacatctacgatggcaggcaaggtatcgcttctgattaaagaccttgccacatacatcacatttacattgtttctcttctaagtgaattatctgatgtttttttaagagtgagctgcaattaaaggatttgaagctctgtatacattcaaaagatttttctctcatgtgtacttcccatttttgtgtgagtaatgaagaatggagggaattatttccatacttattagaaatatgggttttgggcctacaacaaattctttgggatgttgaaactgaggaagcattgttgatagacttctcaacttgattaccaattttcccttcagactgaaatatgtgcggttcaggcagatgcaaatgaaagcttgatccaagctgatctttaatacgcttgtttccagcatgcctttgatcatgttggcctgtactaccagccaactctttgatttctgtcatgggtgctgcatggccatttgtttcatcttctttccactgaaactcgaagccatgaatgtctttctcaatttcatggaaacaaaattctccaatgtgatgacttgcttgtctgtgcaatgtccctgtgtggatcacttctgtattgccttgccctgttgacgacaacgtcttcaacatgcatttggaagagatatctacaaaatttaaacaccaataggtttccaattaagtacagacggtatataatactgaaatgtgtaaatatcacagaaaaaaaacaatacttattttcaacttcccaaacgtgagcttcaaagtttaggaacacaaaaggagtaagattctttaataaataaagggcgattacatgtgcttcaaatcatttctatggaagcctatttccaatatcatgacaaaacactgacagggcacaaacacgtgtgagtctaaagaaaggagtgtttttccactgtgaccctaaagtgtgtcacactgtgcaaaatacatatcactgtcacatcagagaaaaatatatattctccatatttacagcgtatttagggtatacaaataaatgctaaagaaccacacaatatactatattggtaaataatccacaacaagctcttgtaagaataaccaaaattagtggaaattctctattgtcaaacaatcacagcactgacaagataacagaagattacaaaaattagccaggtgtggtggccagcacctgtactcccagctactccagaggctgcgtcacaagtattgcattaagctaaaaggcaaaggttgcagttagctaagattgcatcactccactccagccttggtgcaaaatgagactccatctcaaaaaaaaaaaaaaaaaaaaaaaaaaagacatggcatggtggcttgtgactctaatcccagtaactccggaggccgaggaaggtggatcacctcaggtcaggagttcaaccagcctggccaatgtggtgaaaccccgtcgctactaaagacacaaaaagtagctggtatggtcacaggcacctgtaatcccagctccttgggaggctgaggtatgataatcgcttgaactcgggaggcaaagattgtggtgagttgagattgtgtcactttgctccaccctggacaacagagtgagactctgtctcaaaaaaaaaaaaaaaaaaaaagaaaatgttaataccatatttttctgaataactgttacaaaattacctatatccatgtggaacagttatgttgtgactttttaaaaaattttttgtatttttgtttttttgagatagagtctcactctgtcacccaggctggaatgcgatggcacgatcttggctcactgcaacctccacctcctgggttcatgctagtctcttgccttaggtcctgagcacctgggattacaggcatgtgccaccatgcccagctaatttttgtatttttagtagaaatcaggtttcaccatgttggccaggctggtctcgaactcctgacctcaggtgatccacatgtcttggcctccaaaagtcctgggattacaggtgtgagccactgcaccctgtggcactttctgacattaatggggggagtgtgtccgttatattgcataccacataccgaacactcatatataaattcataaaaatcaattaatcaaatattgcaacccatgataaaacaagcaagaaaataataagtacatttatacagactgaagaattctaaacaattccctcttaagaaaaaagccaaaacttgtacttatcaccagcacacagtgtaagaactgaaatagatgttaagatcactaccttctgatatatgaggtcaagaaaatacacagctttaccaggaacaagaattgactagcggccgggtgcagtggcacatgcctgtaatcccagcattttggtaggctgaggtgggtgaatcatgaagtcaggagttgaagaccagcctggacaacatggcgacacaccatctctactaaaactacaaaaaaatcagccaggcatgaaggaagacgcctgtaatcccagctacttgggaatctgaggcaggaaacatttgaacccaggaggcggaggttgcagtgagacgagatcatgccactgcactccagcctcagtgacaggatgagactttgtctcaaagaaataaaataagataaataactacttctcaaataagctttggtagatgtggtattctctaagaggatgtccctgcagatgcagacattgagagaatttagtcatgggtgttgactactcgtgaataggactagtgcatttataaagggacattaaagaggtccttgcctgttcctctttccaccgtattaggacacagcaggaagatggctgggctaaaccatgaagaatgctctcaccaggaagcaatttggctggcaccttgctcttggatttcccacttcccaaattcattagaaataaatttctgtctcttaagcctgccagtttaagctacatccttttttgtttgtttttgagatggagtcacgctctatcacccaggatgcagtgtagtggcatgattctcctacctcaagtgattctccctcctcagcccagggtctcactctgttgccaagtctggagtgcagtggcatgatcttggctcactgcaacctccacctccagggttctagtgattctcctgcttcaacctcccaagtagctgggattacaggtgcacaccaccatgcacagctaatttttgcatttttagtagagatggggtttcaccatgttggctaggcttgtctctaactcctgacctcaagtgatcaacctgttgcagcctcccaaagtgctgggattagaggggtgagccaccgcggccagccagtctaagctatttctagcaggacagtgaaatgacagagacaggaacaggagcatctcatcatcaacatcaccaagggctgacaaatcttattaaacaaaggaagttaagagtctgtactgtaaaacttgcaatacttgaagccatctactagcactaacatgttttaaaaaccttgagacaggcaaagtgtggtggctcatgccagtaatcccagcattttgggaggctgaggcgggaggatcaccaggtcaggagattgagaccatcctggctaacaagctgaaactccgtctctactaaaaaaatacaaaaaattagcctggcatgttggcactcacctgtagtcccaggtacttggaaggctgaggcaggagaattgcttgaacctgggaagtggaggttgcagtgagcggagatgacaccactgtactttagccgggatgacagaccaaaactctgtctcagagaaaaaaaaaagaaatgaaagaaggctaaagagtaactccaaccaacaagcctatataaagttctccagacagggtgcggtggctcacgcctgtaaacccagcactttgggaggctgaggcgggcggatcaccaggtcaggagatcgagaccatcctggcaaaccaacatggtgaaaccccatctctactaaaaatacaaaaattagctgggtatagtggtgcaggcctgtagtcgcagctactggagaggctgaggaaggagaactgcttgaacccagaaggtggaggttacagtgagctgagatcacaccactgcactccagcccgggcaagagagtgagactccatctcaaaaaactaactaactaactaactaaataaataaagttctccagtaaaggtaaataaaaaaacagtctaggtgtggtcgttcattcctgtaatcccagcactttgggaggatgagtcaggcagataacctgaggttgggagttcgagatcagcctggccaacaaggaaaaaccctgtctctactaaaacacaaaattagatggctgtggtggcgcatgcctgtaatcccagctactcaggaggctgaggcaggagaatcagttgtacccgagacgcagagtttggagtgagctgagatcgcagcattgtacttcagcctgggtgacaagaacaaaactctatctcataaatacataaggtaattaattaataaaaggacagatacagaaactggcatatgtataccttttcttcataactaaacttttttcatattatttgaaataaaaggcatgaaaaacactgtacatatatgttaacggaaatgcaacatacacagaaataattctgacataaataaaaaaattctagtggagaagaagtagtttttgcaggttatggatttttatttttttctgtctcccaggctggagtgcgatggtgtgttatcagctcaccgcaacctctgcctcccggattcaagtgactatcctgcctcagcctcctgagaagctgggattacagccacccaccaccgcacctggctaacttttgtaattttagtagagttgcagttttcacatgttagccaggctggttttgaaatcctgacctcaggtgatctgctcaactcggcctccgaaagtgctaggattacaggtgtcagccactgcacacgttcaggttatggaaattttaagttttgttattatgctataactttaagatgtttaacatacctgcaacaataacctctgcccaaatatctgtacaacacacttcacttctacgtactgaaaggaatggacactaatgttgttatattcacactggaatcatgcttaaaccacttatatgtttacaaagaactaaaagaccaaactatttaaaatagtaacaatggttaggcatggcagcttacatctgtaatctcagcactttgggaatccgaggcaggtggatcacttgagatgaggagtttgagaccagcctgaccaacatggtgaaacccccctctactaaaaacacaaaaattagctgtgcatggtggtgtgcgcctgcagttccagctactcaggaatctggggaacaagaatcctttgagcccgggaggcggaggctgcagttagccaagatcatatcactgcactgtagcctgggtgacagagtgagactctgtcataaaaaaaagaaagaaagaaagtaagagcagagagataagtgggtgcaaagaaagtgtggggaaaagagagttcagattgttactgtgtctatgtagaaaaggaagacataagaaactccattttgatctatattaagaaaaattgtttcgctttgagatgctgttaacctgtaactttagccccaaccctgtgctcacagaaacatgtgctgtattgaatcaaggtttaatggatttagggctgtgcagggtgtgccttgttaacaatatgtttgcaggcagtatgcttggtaaaagtcatgccattctccattctcagttaaccagggacacaatgcactgcggaaagccgcagggacctctgccctagaaagcctgggtattgtccaagtttccccccactgagacagcctgagatatggcctcatgggaaaggaaagaccttacatccccccgcctgacacctgtaaagagcctgtgctgaggaggagtagtgaaagagggaggcctctttgcagttgagataaaaggaaggcttctgtctcctgttcatccctgggaatggaatgtctcggtgtaaagccgaccattcccattcattctcttctgagataggaggaaagcaccccatggctggaggcgagatatgctggcagcaatactgctctgttactctttcctacactgagatgtttgtgtgaagagaaacataaatctagcctacgtgcacatccagacacagtacctttccttgaacttattcatgatacaaattcctttgctcacatgtttccctgctgaccttctccccacctgttgccctgctacactccccttgctaagatagtaaaaataatgatcaataaatactgagggaactcaagagactggcaccgatgcaggttctcgcatgctgagtgtgctagccccatgggcccactgttctttctctaaactttgtctctgtgtcttatttcttttctgagtttctcatcccacctgacgagaaatacccacaggtatggaggggctggcgcccttcagaaagatgtccattcagagatgtgaaaaattaaactttccttttcccacagaattctcccacttgcagagtttcctcacacactatttgaaggtggaacttccactctgcccatctgagctcttacctgcatttacacctgtaatacattcccacccatctggattttttttgctattttcacttcactctccacagtccagggcttttcctttgctccaatatggagataacaggtcagaaagagactcctgcttataaaaagcaaggaccataaagtgctggagctttcgtagagtcccagccctaggtttcagtaggaaagaagacattaccaaaggatctaggaaaacagttcacaaattgctccacctactgcctccttctgaatgctgagggagcactgtaatatgtaatatgtggacatcaagctctcttccaagaatactgagtcaaaagcataggagaagcaaacaggaaactggatatctttaaagtctgccataaggttttgtttttgttttttgagacagagtcttgctctgtcacccaggctggagtgcagcagtgtgttctccactcactgcaaccttggcctcctgggtttaagtgattctctttactcagcctctctaggagctgggattacacgtacgtgccaccacacccagctaatttttgtatttttagtagagaaggggtttctccatgttgatcatgctggtctcgaactcctcacccatagtgatccacatgccttggcctcccaaggtactgggatgacaggtgtgagccaccacgaccaggctgccataaggttttatgcttactttacttctggaacccccactgagctatcatgaagaatgcagaacatctaaacaaaggggacagtgaaagtccagatgctacatcatgaagcttttcatttcaaaatcaatatggcttccattttagtcaaggaacaatggggttcctaagagacaataagagaaaatgcaaaaatacacaagggcacatccccaggagggaagttatcctcacccagggagacgaggttcctataattctccagcatcacgtccctgtataaagtcctctgagcagggtccaggcatttccactcctcctgagagaattctatggccacgtccctgaatgtcaatagaccctgaaatgaaaacacattttaaccaaatggttatgggaggagatcttatctttacaaaaaatgagaggaggagagaggggaaagcatggatttaactgtagagaatgttctgacaaatccaaataagggatttctcactacatgatgtctccccagatgtattttattacactttttgagtattatcaagacatactctcagtataaatttcttatgtttgtgaaaaataacagaaataaacaaataaaaaatcaatgtagggttcctgttataaaaatgtttgaaacttttatagacacaccaagtgacattcattatctagatgagacagagcacaactgatatcttaaaagatgacaacgtccacagtaaaagataggctgggcacagtgacacatgtctgtaatcccagctatgcaggaagctgaggcaggagaatcacttgatcctggaaggcacaggttgcagtgatcccagatcgcatcactgcactccagcctgggcaacagaaactccatctcaaaaaaaaaaaaaaaaaaattagccaggtgtgacggcaagcacctgtggtcccagctacttggaagggtaaagaggtaggatggcttgaccctgagggtggaggttgcagtgagctgcaatcccgccagggcactcaagcctgggcaacaaagcaagaccccgtctcaaaataaaataaaataaatgaaaacaaaattactcaaagtacaaaaatcaatcgtgtatatatatgttcacaaaataataaaacctacagagactcacaaaacactagatgtgaatacaaagggttgtcatttgtcccagattttcaaaatacaaaagattttcaaaatatatacatatgtgtatatatgtatttatatgtatatgtgtgtgcatgtgtgtggggatgtgtatgtacatatataaagtttttaaaaatataaaaagtagcaagttttgtttaatgaaagaggaatctcatcttgctggaaaaggatactttggcagttgtgggcagggggaatcttgtcagatctaagaatatggaaatgccccatcctagaagcagtaatcaccctttcaactgcctgacctggaggaatcttcagatatctgtagtaatgcgggtgtgcacagaggcagccactatggcactctttatacagggaaaaatcgcaaaggacccacgtgttgtcattcagccaatttccaatgcagatgtcaaaaagcaagctagccatgttcactaacatgacaacatgtaaattcacaattagcaaaatcaaatatcaaagtaaaatatttactgggacacaaagaagaaaacaacagacactgcagtctacttgagggtggagcggggaggaaggagaggagcacaaaaaataactattatgggccgggcgcggtggctcacgcctgtaatcccagcactttgggaggccgaggtgggcggatcacgaggtcaggagatcgagaccatcctggctaacacggtgaaaccccatctctactaaaaatacaaaaaattagccgggcgtggtggcgggcgcctgtagtcccagctactcgggaggctgaggcaggagaatggcgtgaacccgggaggtggagcttgcagtgagccgagatcgcgccactgcactccagcctgggcgacagagcgagactccgtcttgaaaataaaaataataataaatatatatatatatacacacacacatcatgtgatgataaatataacaatatatatttaataataattggtggggctgggtatggtgactcgtgtctgtaatcccagaattctgtgcgactgaagcagacagatcacctgaggtcgggagttcaagaccagcatggccaaaatggtgaaacactgtctcttctaaaaatacaaaaaaaattagccacgggtgatggcacgtgactataatcccagctacctgaaaggctaaaacaggagaatcactggaacttgggaggcagaggttgcagtgatctgagatcgtgccactgcactccagcctgggcaactgagaatttgtctcaaaaagaaacaaacaaacaaaaaagctgggtgaggtggctcacgcctgtactttcaacactttaggaggctgaggtgggcatatcacgaggttaggaaatggaaaccatcttggctaaaaaggtgaaaccctgtcgctactgaaaataccaaaaaattattcaggtgtggtggcactcgcctgtattcccagctactcaggagcctgaggcaggaaaactgcttgaactgggaaggcagaggttgcagtgagccgagaacaccactgaactccagcctgggctgcagagcaagatttcgctcaaaaaataaaaattaaaattaatcaggcatggtggcacccacctgtggtccctgctacctcagaggcagaggtcaggatggcttcttgagcctgagggtggaggttgcagtgcgctaagatcacgccactgcactccagcctgggcaacagagtgagaccttctctcaaaatgaaataaaatatatgaaaacagaattactcaaagtacaaaaatctgttttgtatatatatgcccaaaaaataataaaacctacacagactcacaagaaattagatgttaagaaaaagggttgtcattttccccagattttcaaaatatatgtgtttgtatatatgcatgtatatgtatagatgtgtgtgtatgtatgtatgtatatatttatttatatataaaggttttaaaaatacaaaagtagcaagatttgtttaactgaagaggaatctcgccttgggggaaaggatactttggcagtgggaggaaagagaggagcagaaaaaataactatcgggcccgggcacagtggctcacacttgtaatctcagcactttgggaggctgaggcaggtggatcacctgaggacaggaattcaacaccagcctggccaacatggtgaaactctgtctttactaaaaatacaaaaattagccaggcatggtggctggcacctgtaatcccagctacttgagagtctgaggcaggagactcacttgaacccaggaggcagaggtttcagtgagccgagatcatgccattatactccaacctgggcaacaagagcaaaactcagtctcaaaaaaataaatttttacaaaaataacagccaggcatggtggctcacgcctgtaatctcaacacttttggaggttgaggcaggtggatcacgaggtcaggcattcaataccaacctggccaaggtggtgaaacaccgtctctagtaaaaatacaaaaaaaattagctgggcatggtggcgggtgcctgcaatcccagctattcaggaggctgaggcagagaaatgcttgaacccaagaggcggatgttgcagtgagccgagatcacaccactgcactccagcctgggtgacagagtgagactccatctcaaaaaaaataaataaagcaaataaaacaaaaataactattgggtactggacttgataccggagtgatgaaataattggtacaacaaactccaatgacgtgagtttacctctgtaacaagccttcacacatagccccaaaagtaaagtaaaaaaatatataaaatttttttttaatttacaatggaatttttttttttaagatggagtcttcctctgttgcccaggctggagtgcagtggtgcaatctcagctcactgcaagctctgcctccgaggttcaagtcattctcctgcctcagcctcccaagtagctgggactacaggtgcccaccaccacacccggctaattttttgtattttttaatagagacagggtttcaccatgttagccaggatgatcttgatctcctgaccttgtgatccacccacctcagcctcccaaagtgctgggattacaggtgtgagccaccgcgcgtggcccagaattttttttaaagtctcataacgatgcagaaatacacgtgtacgagacttgctctgacagctaacacagaactgacaggagtggctccccagtgaggctggaaggagggtggaggatgtgacagggaaaggagatgtcttatggccaagggtctaagctgcagctttgcttggagttttaccacaaaacaaatatatatatcatgtgatggtgaaatataaccatttatatttaataataactggtggggctgggcatgatggcttgcgcttgtaatcccaacacactggggggccgaggcgggcagaccacctgaggttaggaggttgaggccagcctggccagcatgctgaaacgctgtttctactaaaaatacaaaaaaattagctgggcgtggtggtgcacacctataaccccagctactaggtgggctgaggcaggagaatcacttgaacccaggaggcggaggttgcggtgagttgagatcgcgccattgcactccagcctgggtaacagagcgaaactccatctcaaaaaataataataatgaaggaatgattcatgaattattcatgtctatgtatgaactttccattctaattagtaagatttttggagtcagaaacacagtaactcactccattacctaaaaatgtggtataaaatcagggagaaaagattttcccttattggtctccttttctagaacttaccacgtacttcgtgcatattaatacgtgactcccattggcagctgctccaatcctggtccacagtgagctgacagtgcatccagatgtggcccctgaacaatccctgctgcccaagagcactgacaccacaggaccctcaccccgtgtccatccatgtcggggtgtgagcccttcccaggacctgcccagtgcagcctcttcccaagttcatgacactgggtcacgagagacggaacctaagcgagatgagagggactgaaggaaggcataagtgagggtgagcaaacatgtcaggcaggtcattcagacccagacattcccaactccaaggcccagggtatctgaaaggaaggagacagaacaatccaccgaggatatcatctcacctgaggaagagccatccctgactcctttgctttcctcttcctcttctgggtttctttctcacgtaccaacagtctttagaagtcaatcctgaatgttaaaaatatgttgtttatcactcagaatcaacacaccccctcccttaacacaatgacacaaacataggagacctcaccctgggaaatacggtcccctctgctgcccactgcacaatgaacaaaaaattcctacaggaaaactcccactctcctcctggagaagcccacacacacgctgcagcagtggggagctgggctgggatgagctccccttcaggaaatctctaccaaaaatacaaaaacttagccaggtatggtggtacgcatctgtgtgtctgtggtcccagctacttaggaagctgatgtggaagcatcatttgagctcaaaagtttgagactagcctggccaacatggtgaaagcctgtctctactaaaaatacaaaaattgggccgggcacattggctcatgcctgtaatactagcactctgaaaggccaaggtgggtggattacttgaggtcaggagttcaagagcagcctggccaacatggtgacaccctgtctctactaaaaatacaaaaagtagccgagattggtgggtatctctaatcccagctactcgggaggctgaggtaggagaactgcttgaacctgcgcgacccgagatcgcgccactgcactcctgcctgggtgacagagtaagactcaaaaataaaataaaatacaaatacaaaattagcagggtgtggtggcacacacctgtaatcttagctacttgggaggctgaggcacaagaattgcttgaacccaggagatacaggttgcagtgagccaagatcacaagactgcactcacagcccggaggacagagtgagagtctgtttgaaaaaaaaaaaaaaagtgcatttctgatgggattgacacagagataagaagacttgagtaatgccatagacactgatgggtagagggaacttcagatgggggtgggagggcatgggagacagctctgagcctagacctgaaggagaaagggacagtgccatcttcatttagaaacattgaataagagcagggacaacaacctgagacaggaaggattttgatgtttgaaaaaagagaaaagcaaatgtgactggggcagagggagtcagatgagggtaagctcccaggaggaggctggacactggcagggaccctgaacacagggctgtggagccaaagtgaagagtcgggcttttgtcctggggaacacgggaagcaggtggagggttccctgccaggcactgacatgacctgctttagatgtagctgtgatattctaatacagacaaaggcctccaaagatcctctctgtttctgagtctaccgctctgtttcttccattcttctgcttttttttttttcatttttggggtactgcatcccactgaaaattctaattacaactgggcactctcctctaccagaaaaaaagccacacccagacaccgcctctattttgccaatcatttcaggggtcaggatcactcaggttgagcttttctggtctagcccttcgtcgcaaagatgcagggaggttcactggggctcagagctggaaacattttcacgaagttaccctgagaaggtctgagatgagtgagaaggtgtgcctgaattcttacatgggggcctggaagggctaatgggatgggttggtcttatcatcccattcttaaaattagagaagcatttttcacatgcctgggttaaagaaaattcttttgaaaggttctgatgaaattgactcccaacattgaattcttccttacaagaaaatcacactaacatttataaaatgcagcagtgtaaacacacagctcttgaccttgaaaacagggaaacagggtcagctgtagaaccaagacataagcaaattatttcaatcaagaaatacatgggtggacagctgaggtggttcacacctgtaattccagcactttgggaggtggaggtgggtggattacctgaggtcaggagtttgagaccaacctggccaacatggtgaaaccctatctctactagaaatacaaaaattagctgggctccatccttgcaacttatttaacctcctgttggtccttctccccaatctttagatcgtcctcaatctccatagatttctgcctcttctcccatctatgcgcctcctctgctctccctgttaaattctctcttctctgttataaccccctggacccaatctggcaccccagatccccaggtgtcctccccgctgtgcttctccctctgttctccttgccaccagcaccactctgctctgtctgacccggctccacatccctcctcctctccctcactctgatgagcctccacatttctgcccctctccctaccttgctgtccttcatctctctgtacatctagcttttctctacatttctccagttgcttttctcctcctgctttcttatcttttatcacttttgctgtctcttggcaaatccctcacccatcctctactttgccatctgttatgggtctttctcattcttcttttctctgtctcaggttttctactgctctctcagtccctctctctgtctcctgatccctttggcccacacgatcacaagagggtttggagtaagacgcctgcatctcggagaagcgcattttccaagtgctggagctgggcgggcaagaacaccccgcgtcacaggacaagccccaggcacctctccaacgagggctcaggggacgcggtgactgcggaggggagatctggggagcagcagggcccagcaagaggaggagggaggtggggagcgacgacgccttcggacaagggtgggatccgcaggatcccaggaccacagaacgcagccttcccgggactggggtcgccgcgctgtgctccaggaacccaggagagtaaggctgggaggcgcacagggtgggaatacacctctagggtgaggactttaaaaagagccgtgcggaaggagtcaaaaaacggttttgagcaggaaaactacgcgataggaaacgtatacattgccctatggcagaaagacccgggacgggaccagcctcagggcgactttaaacctaaaaagaaggggcttccggactcccagtagaacatctccatttgctctgagtgaaggaagaaaggcgagaacttccaggtctatggggaccccacatcccatgtacagaagtgccggggacctgggaagctcagacttaacaccacacagagcaaaactcaccgcccgccgcggcgtgaccgtcattccacgggatccacttcctggtctgcgcgaatctgcgcgcgcaggacagaaaccaggcctgggtggagccaacgaggaggcgagcggggcccgggtgaggtgtgggcggggcgcgaagcggcgagaccttgccctttagaacccgcagagggcggggccggagcgggacctgtgcatctctcagcctcctcccaacccgttctccgggttttggcggcgagagcccccaggaaggcagacggataattcaaaagccctggaatagtctggaaggaggatgcaaactagaatgtaaaatgcaaagccctttctgggcggaacgtaggatttcatgctgatggcccacaggacagtatagaaatcttctccctttctattctccattcactcaggagggagagtccacccagtgctcagcttcagagacatccctagggccacagcctgggatgccagacggagtgctcaggccagggaggagtgaggtcaccacctgctgcttaaacacagcagggatgcgggcgtgggagcctgaggtcccagctactcaggaagcagcggcgggaggatcgctcagcctgggggtccaggacagcctgcgcgacaatgtaacattccctcccgcagtctctctcttttttaaatttttaaaataaaatttttattaggccgggcacggtgactcacgcctgtaatcccagcactttgggaggctgaggcgggcggatcacgaggtcaggagatcgcgaccatcctggcttacacgatgaaaccccgtctccactaaaaatacaaaaattagccgggcgtggtggcgggcgcctgtagtcccagctactcaggaggctgaggcaggagaatgcggtgaacatgggaggtggagcttgcagtgggccgagaccgagccactgcactccagcctgggcgacagagccagactccctctctaaaaataaataaacaaactaaatttgcttgtgtgagataggaatacaacattactcttctccatatggatatccagttagttgtcccagcacatttgtaaaagagatctgttactttctcctttttatttacattttttctttttcttcttcttcttctttttttttttttttttgagactgagtatttctctgtcgcccaggctggagtacaatggtgacatctcggctcactgcagcctctgcctcctgggttgaagcgattcttctgcctcagcctccggagtagctggcattacaggcacacccaccatgcccggctaatttttgtattttgggtacagacggggtttcatcatgttggacaggctggtctcgaactcctgacttcaagtgatccgcctgcctcggcctcccgaagttctgggattacaggcgtgagccactgtgcctggcccaagaaatactctttacttcgctttttaaatgttgaaaaaatacaattgaaaactaaaaaatcttccccaaaatgagaaatcatcttcatgacaaaacaggaagaaataaaaaccattttattagtaaataagccttagaccagaatgtgttgggaaatacaggcaaagagctgagaggttgaaaagagagaaacttcactgctctatacaacccattaagtacatgttttcaagataaacactaatcagtcctcagggaagaggacttgacaagtctttggtcgcacatagttcatcctggctctacttggtaatggaggtgaccatctgtgtcagctaactagcttcatgcagaaggaggggaaatacattaacccacgtctttttgacaagtgtgagttttacgacatggcgacaggtgccctctctagtgaggctcctacaatctgacggaaactgacgtcagcagtaaataataaaattcagaatacacgattaattatagagtttattggaacacaaagtttgaggatagccatctggaaacatcaactccaaatgaagggggcccgtgttcccatgtagagatgttaaggtttcacacacagggaaagacagagaagctttagcagaatcaacacattttccattcaagaccagtgcataggctgcggcagcttgactggtgatggattgatacacttcaaggaaggttactttatcactccgtaagaagggacaatgatgccaaaaggtcttatctctggggctgggtagtcttcctacttacaggtaaactgtttttttttaaattgatattaggaaactaaattttattgcactacacgctaccagttacaaagtagggtgtcctcataaacaaaggaaatgcctcctctttaagtttttctttcttttttttttttttttgagacggtgtatcgctctgtcacccaggctggaatgcagtggcgcaatatccgctcactgcaagctccgcctcccgggttcacgccattctcctgcctcagcctccagagtagctgggactacaggcgcccgccaccacgcccggctaatttttggaatttttagtagagacggggtttcaccgtgttagccaggatggtctcgatctcctgaccttgtgatgctcccgcctcggcctcccaaagtgctgggattacaggcgtgagccactgcacctggcctgtttttcttacataggcgcctaggtaaaaactaagatatgtctacctgccggtctgctgacagtctaacaaaacttattattttgttgatttaaagctatccttaggcggtcccggtggctcactcctgcaatactagcaatttgaaaggctgtaccagggggatcacctgaggtaaggagttccagaccagtctggacaacatggtgaaagccagtctttactgaaaatgcaacaattagccaggcctgggggcacatgtctgtaatcctagctcctcaggatgctgaggaagtagaatcgcttgaacttgggaggcgggggttgcagtgagccaagattgtgccattgcactccagcctggatgacaagagtgaaacggcatcaaaaaaaaaaaaagaaaaagaaaaaaaagctattcttggtattttagtgtgcaagtacttgaaagcatgactgtaattattttagaagcatagattgtcatgggatattgagtcatctggacattgtttttctgtaggagtttgttcttgcaggtactattaagctgctttccttaactgtaaacatcttaagatcatgactcatgcgtgagcagtaaggactacgtcttgctagttttagtagactaaaactttgtcattctagctctcctaggatcctgtttaacagtttttccactcatgcaccacagcgttctaagcacaattatggagacaccactcttttgtaatgcactgacaccatgtcactgcactttagtctgggcgacagagtgagattccgtcaaaaacaaacaaacaaacaaacaaacaaaacaaaaacgaaaactcatccaaatcagaaagaaagaaataaaattgtatttgtttgtagatgacatgatcttctgtggaaaaaatccaaagagtcaaccaaaatactactggaactaataaacacattcagtggatttgcagaatacaatatcagcagcaaaaattagttgaatttccatacattaacaataaacaattttaaaagaaaattaagaaaaccgttccatttgctagagaaatttaagtaagaaatactaaggaataaatgtaaagaggtgagacgtttgtaccttgaaatccacaaacactgatcaaaatgattaaaaacatatataaatagagatagaacccatattgatggattggaaaaattaatattgctaaatgattatataacctaatgtgatttagattcaacacggtacccataaaaatccctatcagattgtgttaaagaaacaaaaaactggctgggaaaagtggcacacgtctgttggccaggctgatctcaaactcctgacctcaagggatctaactgccttggcctcccaaagtgctgggattacaggcatgagccaccgtgcctggcccaatcctcttaacataaacactttaacatcaattaatgcttgaactcaatgttaaatcaactcaaactcaagtcaatgctgaattgactctaatgacaattaatgcttgatggtttgctatactcattgcctgtgcatcaattatctcaaaaatgaattttctgatgttctgcaaggagtgacctcagactgaaaccttgtcacacttatgacatttgtaagatttctgtccagtagggattctctgatgcctaatgacttgtgaacgtgaagtaaagactttgccataattatcacacctgtgaggtttctctcctgtatgaattctcctatgttttgcctaggatgaagcttgactgaagaccttgcctcaatcatgacatttgtaaggtttctctccagtatgagttcgctgatgaactgcaagttatgaacgatgtctgaaaactttgccacatttattaacacttgtaagatctctcttcattacggattctccaatgatttgcaacagttctagcattaccaaaggcattgtgacaatcattgcattagtaaactttccctacaccatggattgcctgatggatggtgagtaagtggtgattgcccactaaaggctttgccacactcattacacttgtaaggtttctctccagggtgaattctagtatgtcctgcaaggtgtgaatcacacccaaaatccttatcacaaaccttacatttgtatggtttctctccagtatgaattcacctatgtctttcaagctgtgatttacgactgaaaactttgtcacaggtttttctccagtatgagttcactgatgaactgcaaggtatgaatgatgactgtaaaattggccacatttatcacacttgtaagatctctcttcattataggttctccaatgatttgcaagtgttgtagttttactggagactttgtggcagtcattacatctgtgagctttcactataccatggattgcttgatggtgaataggcgatgccctcaccctaaaggctttgccacactcattacacttgtaaggtttctctccagtgtgaatttcagtatgttctgcaaggagtgaattgagcccaaaaaccttttcacaaaccttacatttgtatggcttctccagtgtgaattctcctatgcattgcaaggtgtgatctgcaactgaaaacgttgtcacattctttacatttgtaaggtttctctccagtatgaattgccttgtgaacaaaattacaacaaattagctgggtatggtggattccgcctgtagtctcagctgttctggaccctgaggcaggggaattgcttgaacccaaggcagagattgcagtgagctgagatcgcactgctgaaaagacacaaacaagttgaaagccactgtgactcggctcattgcaaactgcctcctgggctcaagcgattctcctgcctcaacctttcgagtagctgggactgcaggtgcacaccaccatgcctggctaagttttgtatttttagtagagacagggttttgtgatgctggccagactggtctcgaactccttactgcaaaaaaatgaatatataatacatagaagtatatgtatttctatgaaatatataacacatagaaatgaataagttgaaagcctctgtgtcttaaacaaatgacagtagaactaaaatatgggaaggtcgggcatggtggttcacacctgtaatcccagcactttggaagtccaaggcaggtggatcacgaggtcaggagttcaagaccattgtggccaacatggtgaaaacctgtctctactaaaaatacaaaaattagctgggcatggtggcatgtgcctgcaatcccagctactcaggagactgaggcaggagaattgcttgaactgggacctgggaggcagaggttgcagtgagccgagatggtgccactgcactccagcctgggctacagagcaagactccatctcaaaaaaggaaaaaaaaaaaaaaagaactaaaatatgggaatctcattcaacctcacaagctccctcaataagaatgatgaaaagtgtaactgttacagggttgatcccacaacaaactgaacaaagcttttcttgttaaaaatgaacaatgccaggtgcggtggctcaagcctgtaatcccagcactttagaggccgaggcgggtgggtatggaggtcaggagttcgagacgagcctggccaacatggcaaaaccctatctccactaaagatacaaaataacatgctgggcatggtggcacgtgcctggaatcccagctgtgtacatcaaaagcacgtatggggcaaaatcacaaaagagaatacaaaaccaggaaaagccaagatacacaaggacagattcttcatgtctggaggaacattttcctcacccacagactccaggttcctgtagttctcccacatcacagccctgtataaagcgttctgtgcagggtccaggcgtttccactccagcaaagagaactctatagccacatctctgaaagtcaagtatccctaaaatgagaaacacgtttaaataaaacattatggaggcgttatcaccttcacacgaaatgagaaatgggaaattaagtatcgattgggccaaagaatatgttctgacaaacccgtattaaggtatttttgaacatcttttctctatcgttgcattttattgtacttttccatgagagatttcaagatcccctaagtaaaaaatttacaaataaaaactaaatatagtgttttctctataaatacgttagatattatgttcagcctaacacttgatattcattatctggatgagctaaaatacaagtgcagtctcagagatgacaaagtccagtggcctaaagaaaagaaagtcagggccagccatagtggctcaagcgtgtaatcccagcacgttgagaagtggagggaggcagatcacaaggtcaagagtttgagatcagcctgaacaacatggtgaaaactcctcttctcccaggaggcagaggatgcagtgagccaagataacatcagtgcactatagctggagcaacagagagacactccatctcaataaaataaaaataaaaattggccaggtgcggtggctcacgctttcaatctcagcactttgggaggccgaggcaggcagatcatgatgtcaggagatcgagaccatcctggctaacacagtgaaatcccgtctctactaaaagtacaaaaaattagccaggcgtggtggcaggcacctgtagtcccagctactcaggaggctgaggcagaagaatggtgtgaacctgggaggtagagcttgcagtgagccgagatcgggccactacacgccagcctgggtgatagagcgagactccttctcaaaaataaaaaataaaatttttaaaaaggtggggcacagtggctcatgcctgcaatcctggcactttgggaggcagaggtgggcagatcacctgaggtcaggagttggagaccagcctggtcaaagtgatgaaacaacgtcgctactaaaaatacaaaaatgagctgggtgtggtcgtgggcacctgtaatcccagctactggggagcctgaggcagaagaatcgcttgaacccagaaggcagaggttgcagcaagctgagatcgtgctactggactccagactgggtgagaagaacggtaccccatttcaaatatatatatatggtctggagggacattttcctcacccacagactccaggttcctgtagttctcccaaatcacggccctgtataaagcgttctgtgcagggtccaggctttatatatatatatatatgtaatacatatatatatattacatatatatataatacatatatattatacatatatatttatatattatacatatatatttatatatgattatacatatatatttatatgatcatacatatatatttatatgattatacatatatttatatatgagattatacatatatatttatatatgattatacatatatatttatatatgattatacatatatattatatgattatacatatatattatacatatatttatatatgattatacacatatttatatatatgattatacacatatatttatatatatgattatacacatatatttatatatatgattatacacatatatttatatatatgattatacacatatatttatatatgattatacacatatatttatatattatacatatatatttatatattatacatatatttatatatatgattatacacatatatttatatatgattatacacatatatttatatattatacatatatatttatatattatacatatatttatatatatgattatacatatatatttatatattatacatatttatatatatgattatacatatatatgattatacatatatttatatatatgattatacatatatttatatatgtatgattatacatatatttatatatgtatgattatacatatatttatatatgtatgattatacatatatttatatatatgattatacatatatttatatatatgattatacatatatttatatatatgattatacatatatatatatataaaatcataaggctggatgcagttactcatgcgctgggtgcagtgactcatgcctgtaatcccagcaatctgggaggccgaggtgggcagatcacctgaggtcagaactgtgaaacccctcctgcaggaaccctccacatacatgtagtgaagtcaacacactcagaggcagccagggtggcattcttggtaacggtgaaaaactgggaaggactcacacgtcttcattcagaaaatgctccaaggaggatgaaaaacagcaaactatcttgtttcctaccttgaaaatgtggaacattttaacacttgcaggataaaataccagaacaaaacatttatcatgtcgagctctttggctcacgcatgtaatcccagtactttgggaggccaaggagggaggatcacttgaggccaggagtttgagaccagcctggccaatatggagaaacgccatctctactaaaaatataaccattagccaagcatgatggcacatacctgtaatgcagctactcagttggccgaggctagaaaatcatttgaacccatgaagcagaggttgcaatgtgctagtaagttccagcctgttgacagggtgagacacctgtctcacaaaacatacaaaaaaaaaaaaaaaaaaaaagaaaagaaatgactaacagtgtcagacggctgaattatgatgtcacgactacagttaaataacagtcaggcaatacggcaattctatatacacatattgcccttagttatctagttcactatgcgtaagatataaaacatagaatgtgtactgggaaaattgataaactgggatcagagaaaacatagtataaaacaaatcgtataataaaaacataaaaaaagatgcaggctccctggtctggatgttcatattggccaaaagccatgtttggatttaattaattaattaattaattaatttatttatttatgtatttattttttgagatggagtctcactctgttgccaggctggagtgcagtggcatggtctcggctcactgccacctctgcctcctgggttcaagtgattctcctgcctcagcctcccaagtagctgggattaccggtacgtgccaccacccccagctaatatttgtatttttagtatagacggggtttcaccatgttggccaggctggtcttgaactcctgacctcatgatccacttgccttggcctcccaaagtgctgggattacaggcatgagccaccgtgcccagcccatatttggatttcttattctccaacaggatgttcctgcagatgtggcatttgagataatttggtcatgggtgttgactactcatgaataggaccagtgcttttatttttattttttttctttctttatttttgagaaagagtttcactcttgttgcccctgctagagtgcagtggcctgatcttggctcacagaaacatccgcctcctgggttcaagtgattctcctgtatcagcctcccgtgtagctgggatttcaggcatgtgccaccacacccagctaatttttgtatttgtagttgagatgaggttttaccatgttggccaggctggtctcgaagtcctgacctcaggtgatctgcccgtctcggccgcccaaagtactgggattacaggcttgagccaccgcacccggccattttttttgttcagtagattcaaggattcagcatgttggactgactggtctcaaactcctcacctcaagcaatctacccccatcagcctcccaaagtgctgggattagaggtgtgagccaccatggccagccagtctacgccgtttctgacaggacagtgaaatgacggagacaggaaaaggagcatgtcatcatcaacattgctgaaggctgacaactcttattacacaaaggcagtttacagcctgtcatataaaagctgcaatgtgtgaagccatctaatagcactaacttgtttaaaaacctggaggcatccaggcgcagtggctcacgcttgtaatcccaacactttggaagaccgcggtgggtggatcacctgaggtcgggagttcgagagcagtctgactgacatggaaaaaccctgtctctacttcaaatacaaaattagctgggtgtggtggtacatgcctgtaatcccagctacttgggagcctcaggcaggagaatcgctcgaacccccggggcggaggttgtggtgagctcggattgcgccactgtagtccagcctgggcaagaagagcgaaactctgtcaaaaaaaaaaaaaaatctggaggcaaattaacattatttctcaaataagttctcaaataagtacagcaggcccacagtgttcatgtacatgaccccaatttgcacatacagtaagtgagggacaaacttgattcttggcctgaaggatcccacgacatgtttctaagcaaaatagtccaccaagaaagtacagaaaacaaccagtcacaaaaaatgctgcaaggagaacagaatgaaatactacaagggggatacaagcaagggctgagctgggacacaagcgctgagctgcgctgctgacagtggttctgaagccatccctcatggatcatgtgctgagtcatgatgccctgcacacactgatttaggcagcctccaataattttgtccagtggatgaataaggtcttgacttactcagtgagagtagtgttggaggggaggggctcacggggaaattggggtgttcacttttacaaagtcaataggctggtatttgcatccagatcaatgtatcatgtgaggcaaggccaggaaaggaagggcaagggtggagagcaggaagtaatgggcatgtaggagtgaactttgtgcatgcacctctgtgggaatataattccactaggatagaccaaatcttgagcttggaagaaagtggaactaatttagcaaatggtaaaatattgacccaaggttaaatatgcaaattacaatatgggcaagggacaagaatgaaagagatccaaaaaagcagcagtatggtggcctaaggtgaaagcagttttacatctcttaaattaaatggcctctgatacctagtttcaagagtatacacaacaatataccaagtatagattccagaatttcatacacacagaaaaaaatgagtaaagtctatgaggagtgcagcagcgaaggagaccatggatgtgaagaattccctggctgagtaggtagagctgtgtttgtgaaaacagagacagactgagcgcagtggctcatgcctgtaataacaataataataataatgacaggttttttttctttttttgagatggagtgtcactcttttgcccaggctggagtgtagtggtgtgatctcggctcactgcaacccctgccacccaggttcaagcaattctcttgcctcagcctcctgagtagctgggataacaggtgcctgccaccgggcctggctaaattttctatttatttatttatgtatttatagagacagagtcttcctctctcacccaggctggaatgcaatggtgcgatctcggcacactgcaacttccgtctaatggtttcacgccattctcctgcctcagcctcctgagtagctgggactacaggcacccgccaccacatctggctaatgttttttgtatttcattagagatggggtttcaccgtgttagccaggatggtctcgatctcctgacctcgtgatccacccgcctcagcctcccaaagtgctgggattacaggtgtcagccacagcgcccatcctaaattttgtatttttagtagagacagggtttcaccattttgatcaggctggtcttgaactcctgagaacctgcctcagcctcccaaagtgctgggattacaggcatcagccaccatgcccaggcccttcttactattaactcattattgtgatagttgatgacaatgaaaaatacttaaaatagccaggtgcggtggctcacacctgtaaacccagcactttgtgaggccgaggtggatggatcacgaggtcaggagatcaagaccatcctggctaacacggtgaaacctcgtctctactaaaaatacaaaaattagctgggcatggtggcaggcacctgtagtcacagctactcaggaggctgaggcaggagaatggtgtgaacctggaggcggagcttgcagtgagccaagatcgggccactacactccagcctgggcaacagagccagactccgtctcaaaaaaaaaaaaaaaaaagaaaaatacttaagatcattacaattattataaaaaataaaacttatggcaaatgttgtgttttctacataaaccataggtttatccatccatgtatttatgcacacacatcacatcatgccattacacgtgtggtggtgcacacctctagtcccagctactcgaggtgctcaggcaaaagaatcactgtaatccaggaggcagaggctacagtgagcctaaatctcactactgtactccagcctgggcaacagagggagactcaactaaaaaaaataaaatacaatcaatgatgtgataaagcattctacaccactgatgtgtatcttcactttccattccattccaagtcattaaaaatgcagagtctagcctggcatggtggctcaggcctgtaatcccagcactttgggaggctgaggtgaaaaaacacaaggtcaggatttcccgaccagcctgaccaatatggtgaaatcccatctctactaagaatacaaaaaaattagccaggcatggtggcacatgcctgtaatcccagctactcgggaggctgaggcaggagaattgcttgaacccaggaagcagatgttgcagtcagctgacagcctgtcactgcactccagtttgggcaatagagcgagactccatctcaaaataaataaataaataaaacaattagccgcttgtggtgacacatgcctatcattcaagctctttgggaggctaaagtggggattgattgagcccaggagtttcaggctgctgtaaactctaaattgtgccattgtactccaaaactaagccacagagcgatattttctcccactctctctccaacatggtgaaaccccatctctaccaaaaatacaaaaaattagccaggcatcctggcacacatctatggtcctagctacttgggaggctgatgcaataagatcacttgagcctgggacacagaggttacagtgatccaagactttaccactgcattccaccctaagtgacagagtgacactccacttcggaaaaaaaaaattccaaaaccatcttgtatattcctgagcaaaagaaacttctttcgaggtctacggttctgatggcatcaatcccaaacatgtaattactcactcccagaaaatcacagaaatatgttcaaaatgtacacattgtgaacacatagctgcaggtgtttaaaacactgaaaaattgtgcacacatagctctaggtgcttaaaacactgaaaaagaggcagctgtagcaatgagatctgagcaaatgcttttctcatgaacacatgggctctgctaaaccaaggttccaagtcaatccagcccatccttcaacatctgcagagaatattatggaccagagggatttaaattaattatgttacaaagagaggaagcaacacgtcatcacttcatcatcacatccaatcaactcaccgctcatctgcacccagggtcccccttcgtcttcattactgtttccctccatcattctgtacatagctctcattctcaccttctctgaaattgggattagccaggtgtggtagcacctgcctgtcatcctggctccttgagaggctaatgtgggtatcacttgagcccacgaatttgaggctgctgtaaactagaattgttccattgcactccagaaagggccccaaagtgacaccctctttcttaaaaaagaaagtttggagtcagagacatattgactcactggtgtagcttcaaatccattacaaaagcagacacaaaatatctcccatagtttgtttccttttccagaatttaccagataccagtgtatattaatgtactgaagggggcctgcccctccacacctgtgggtattcctcagaaggtggagataagagactgagaaaagaaataagacacagggacaaagtatagagggagaaaagtgggtccgggggagcagcgctcagcaagtgaggacctgcaccggcatcgacctctgagttccctcagtatttattatttatttatttatttgagacagagttttgctctgtcacgcaggtggagtgcagtggcatggtttcggctcactgaaacctccgcctcccgggttcatgccattctcctgcctcagcctcccaagtagctggaactacaggtgcccaccaccgggcccggctaattttttctatttttagtagagacggggtttcaccgtgttaaccaggatggtctcaatctcctgacctcgtgatctgcctgcctcggcctcccaaattgctgggattacaggcgtgagccaccgcgcccagcctctctcagtatttattgatcactatctctactatcttggtgaggggaatgtagcaggactatagggtgatggtgaggagagggtcagcaggaaaacacgtgagcaaaggaccctgtgtcataaataagtttaaggaaatgtgctctgcctggatgtgcatgtaggccaggtttatgtttgactttacacaaacatctcagtgcagtaaagagcagtattgctgccagcatgtctcacctccagccatagggcggttttctcctatctcagtaaatagaatgtacaatcgggttttacaccgagacattccattcccagggaggagcaggagacagatgccttcctcttatctcaactgcaaagaggcctttctctttcgctaatcctcctcagcacaggcccttgtcgggctgagggacctgtaaggtctttcccttcccataaggccatatctcaggctgtctccattgggggaaacctggacaatacccaggctttcttgggcagaggtccctgcagctttctgcagtgcatttgtgtccctggttaatcaagaatggagaatggcgatgcctttcacaaagcatattgcctgcaagaactttttaaacaaagcacatcctgcacagcccgagatccattaaatcttgattcaacacagcacatgtttctgtgagcacagggttggggctaaggttacagattaacagcatctcaaagcagaacaatttttcttagtacagatcaaaatggggtttcttatatcttccttttctacatagacacagtaacaatctgatctctcttttattcccccacaacgtatgactttcatacacagtttctctgatctggtccacaaagagctaaacgtccatccagatgtggcccttgaacaaaccctgctgcccaacatcactgacaccatggggcccacaccccatttccatccatgcctggtgtgagcccttcccaggaccatgcccagtggagcctcttcccaagctcacatcactaggttataggagatggaatttaagtgaagatgacaaggactgagaaaaggcatgggtgagtgtgagcaaacgtgtgaggcaggacgcttcagactcacaggagactgactactacaatacctggcatttcagaaaggaaagagacagaagaatccaatgagaaatatcacttcacctgaggaagagccatccctggctccttttctttgccttcttggtgtcttcctcaagtaacataagtctctggaaatcaatcctgtatgtgaaaaaaatcagagatttaatgtttagaaatcactccctccttttctgtggcaaaacacacacacgggagatctcacctgggagaaagacagccctctgctgcccactacaccagagattatgcggagataagaaggtgccacaggaagacctacaagggtaattttgacccattttcagatctttctcccctcctggaaaagtccacacacacgctgcagcaggacacagaccttcaggacacagatctggccctaaccaaaccccatgcagagcacagccccctcagctccctgtggatcacaggctgatctcagctctcaacatggaggaaactgccttgattttcaatgctggagacagataaggatcaccagtgccatagtaaatattactgagggtgggtttaaatctatgataatagcaatctctgataaaacagcataaaagatgtatttgcaaaatgcctgagaaccctaatgtgaagtcagggttgagctccactcagtgggtgccagcctagcacagccccaccttctggctctgctctccacttggggactttttcccaccaggatccagtgaacagcgaaggagcaaaaagaatcacacagaacaggcaacatggatcagaggtgggggtgaaggtggggctgtcatgtcatatgggggctgtgggtgatcacaaaagtttccatagaaaaaagtgatgtcagaacaaagacttagggaagaaacgctgcttgtcacttgcagctgaggggccagagagtcctaggtagggggacagcccaggtgaaggccctgagataggagcaacctcagtcccagaaaaaggaaagaagcctgcgtggctggagcagagggagcgaggaggacacaggcaggagatgaagtcagaggggtcctgggagcccagatctgcagggatgaggccttgaaacatttttctcccacacctcaaaggaattttggaaacgatgtattttctcactcctttcatgtatacatgcaaatgtctctttacattataaatgacaacacttacaaataatgtaatttatctcccatacttaaaatacatgctgtcaagtttggctaagcttccagaaatacactgtcaccctcatctgagacatgtaggactgtaagggaatgtgtttgggggtttaggaagtcacttatggacacgtgaaggtggagatgcctgtttgatgtcccagcagagagctgaggagacaactgcacacaggattgtagagctcagtggagaggcctgcaggggacatgggtaggtgggttaaagctgtgagatgagataaggaaaagcagtgggtgtggacagagacaagaataggttcaagatgatttgagtctaatcccgtttttccattctggtatttgtgatttttacatttttggaggactggaatccatttaacattcaaattacatctgagcagtaccctctcctaaaggaaaagccacacactatttggcaaagtatttcagggctcagtgaaattccatctctaccaaaagtacaaaaaattagccaggcgtggtggtgtgcatctgtggtctcagccatttgaggggctgactgtggtggatctttgggcctgggaggcagaggttgcagtgagtcaagatggtgccactgcactcaagcatgggtgaccgagtgacactccatctcaaaaaaagaaaaaaaaaaaattccaggacaattttatacacctgagcaaatgaaatgtctctttcaatgtctaaggtcctgatggcatgaatcctaaacatgtaattattttcccagaaaaatcatagtaatatcttcaaaataaacacaattatgaatccctagctataggtgtttaaaacactgaaagagaggcagtggtacaaatgagatctgagcaaatgttttcttcatgaacacatgggctctgctggaacaaggttccaggccaatcctgtccatccttgaacatctgcaaagaatattatggaccagaggaacttgaggggaaagcttatttagcagctcacagctcaccatttaattagatgacataaagaaagaagatggaataataggctacttcaactaaattttaatgttagcataaagaaaaagttccttgatatctttatcaagtacacatcgaaacaacctaaaatcatttatcaggtactagaaaatgtttccaatgtatgatacagactagaaagcatgcagtcctcaatgtaaactaaacacaataaatttcagagaaaaacaattttaaaatggcttaaaaatatatctaatgaaatgtggggtcaaagaagaacattttgaacacataccgtagttgcaaaacaatgatgttacctcgtaagattataccaaagctttcatgagaagcagttttttatattactttaattttattttagagatggagtctcgctcttgcccagccagagtgcagttgcaggatctcagctcactgcaacctccgcctcccgaattcaagccattcttctgcctcaccctcctgaatagctgggattacaggcactcgccaccacaccaggctaatttctatattttggtcaaaacgaggattcgccatgttagccaggctgttctcaaatacttgatctcaggtgatctgcccaccttggcctcccaaagtgctgggattacaggcatgagccagagcacctggtctatttttttttttttaaattaagaaacacgttggtcatggtggctcatggctgtaatcccagcaccttgggaggccaatacggctggatcgcttgagccctggaattcaagaccagctcgggcaacatggtgaaagcccatctctactaggaacacaaaaatttgcccggtgcggtggcacctggctatggtcctagcaactttggaggctgaggtgggaggatcccttgaacccaggagattgaagcttcagtgagggctgatcctgtcaccgctctcatgcctggccaacagaatgagacccatctttaatagaaatgaagaaaaaggaaacacatgcgtcctgggtctggggacagggagagtctaaggccaattaacacgaacctcaggaggtcctgatgacgtgtgtccatggtgttgaggctgcagtttggtttcacacattttacagacacacgagacagcaatcagtacatatatacattggtccggtctggaaaggtggaataactggaattggggaccttctgggtcacaggtagataacaaataacattctttgaatctttgatcagcctttcactaaatacacaatttatatgtgagcagggaggagggataagtcacttatgccttaggctggctcagggaccctgtatttttacataaatagggcaagggaagcaatcagatagacatttgactcaggtgtgcagagggatgggctctttcccacatctgtgaagataagctctcagtttacatcgccagggtgaaattcaacagaactattttagggtggagatcttgaggttcccggtttgggaggggcatatgtagctttttaaaaaatctttgtaactatcttgtttaggaataaaatggaaggcaggtttgtctgacgcagttcccagattgacttttctctttggcttagtaatttttattttcctttcacaagcttgtgacagccataatgctttgacacactgatactgttttatatagatttttccacaacagtaaagtccaagggtctgtcatgaaccgggttagagaagatgagaaaattttcagaagactccatctcaaaaaaacaaaacaaacaaaacagaatttaaaatacagaattaagtcatttgactttttttaaatgaaaagtctcacatatttattactgaaccaagccaacaaaggtgttcataacagatccagagaaaaaaaatacattctcaataaaacatgtccaactctccagatagtggtgacattttcagcttgatatggtaacgtgactgaatcttcagacagcatgaatatgtgtgccatctcatatgcaattccttatagatccagcttggctcttctccagtgtcgtctttgacagttgtacctataaaacttatgtggatggtctgcctgccactctgtgcatcactttcttttttttttttttttttttttttttgagatggagtctcgctctgtcacccaggctggagtgcagtagcatgatctctgctcatggcaagctccacctcctcggttcatgccattctcctgcctcagcctcctgagtagctgggactacaggcgcccacaaccacgcctggctaattttttgtatttttagtagagatggggtttcaccgtgttagccaggattttctcgatctcctgacctcgtgatgctcttgcctcggcctcccaaagtgctgggattacaggtgtgagccaccacacctgtcctgtgcatcactttcaacatcatcttgtcccaacttaaaataagttttccatttacaaactggtgatttattttgggaatcgtccccataaccttttcataaagcatcaatgatttcattgtccctctacccaaactttaccagattcatttttcgatacactatctgtctctgtcacccatgctggagtacaatggcatgatcatggctccctgcagcctcgaactcctaggctcaagccatcctcccactgcagactccacagaagctgaaccagcagacatgtgccacaatgcccagctaatttatgtattttttgtagagaaggtggtttcaccattctgcccaggctggtcttgagtaccggggcccacgtgacccaactgtctcagcctctgaaaattatgggattacaggcctgagccacagcatctggtctcatcgcaaatttgatgtttcttcttgtttcagttttagcagaatttacattgccttgattgagtctcttttcaaactcatgtcttacccatctgagtgcctcaaaccaaaccctgttcagacatgttataacggatttgtatcagtttatcttggtgcaaaaaatgtgatatcatgcacaattttctcataatatgtatttttccatgaacttcctgaagaccccttgtactagcgaactgtattcaagaggttataaaaaggattgttgatatgcaagtgccacttatttctgggatgcaaaatggttcaacatagtcaagcaaatcaatgtgatataccacttgaacataatgaaagatgaaaaccacatcatctcaatacatggagaaaaagcatttcacaaaattcaacatccagtcatcatggaaatcctaaacaaaatagaaagagaaggaaatttacctcaacaatacaaagaccatccatgaaatgaccacagcagaaataaccagtcagggaaaatggaatgcttttcctgtaggatctcacatgatgcaagaatgctctcaccccttctattcaatcaatactggctgtcctagctagagcaatgaaatagcaaaagaaatcaaactcatccaaatcagaaagaaagaagtaaaactatttctttgtagatgacatgatcttctgtgtagaaaatcacaaagagtcaaccaaaatgcaactggaactaaaaaacatatgcagtggatttgaagaatagaataacagcaccaaaaattagttgaatttccatacattaacaataaacaatttaaaaagaaaattaaaaaaacactttcatttgctaaagaacttaaagtaagaaatacttaggaataaatgaaaaaagttgagaagtttctaccttcaaatctacaaacattgatcaaagtgataaaaacatgtgcaaataagagatacaagccatattgaatggaataatattgctaaatgattataactgaatgtgatgtagattcaacacaatacccagagaaatttctataactttttgttaaagaaacaaaaaacaggccaggtgtggtggctcacgcctgtaatctcagcactttggcaggtggaggcaggtggattttaaggacagaagatcgagaccatcctagctaacacggtgaaacccagtctctactaaaaatacaaaaaattacccgggcatggtggcacgcacctgtagtcccagctactcaggagactgaggcaggagaattgcatgaacctgggaggtgaatgttgcagtgaaccgagatcacatcactgcactccaacgtgggcgacagagcaagattccatcttaaaaataaataaataaataaaagaacatacaggctgggaaaagtggctcccgtctgttggccaggctggtctcaaattcatgacctcaagtgacctacctgtcttggcctctcaaagtgctgggattacaggtgtgagacaccacgcctggcccaatcctcttaacataaacagtttaatgtcgattaatgcttgaaatcaatgttaagtcaactcaaactcaggtcaatgctgatttgactctgatgtcaattaatgcttgatggtttgctatactcattgcacttgaaacaattgtctccaaaaggaattttctgatgttctgcaaggagtgacctcagactaaagaccttgccacactgatgacatttgtaagatttctgtccagtatggattctctgatgcctaataaggtgtgaaggtgaattaaaggctttaccacaatcaccacacttgtgaggtttctctcctgtatgaatcctcctatgtctttcaaggtgtgatttgcgaatgtaaactttgtcacattcttcacattcgtaaagtttctctccagtatgaagtttttgatgacatgcgaggtacgcttttgtactaaaaaccttgccacattcattacatgtgtaaggtctctctccagtatgaactctctgatgttctgcaagacgtgaatcactccggaaagccttgtcacaaaccttacatttgtatggtttctctccagtatgaatcctcctatgtctttcaagatgtgatttgcgactgaaaactttgtcgcattcttcacatctgtaaggtttctctccagtgtgaactctacgatgtcctgcaagagttgctcgttgcttaaaaaccttgccacattcattacacttatagggtttctctgcagtatgaactgccttatgaattacgaggactgaatttcgagcgaaggtcttgccacactcattacatttgtaaggtttctctccagtatgcagtctatgatggtacacaaggtgtgatgtctgactaaaggtcttgccacactcattacacttataaggtttctctccagtatgacttctatgatgacatgcaagggttgctttttgatcaaaaaccttgccacattcattacatgtgtaatgtttgtctcccctgtgaattctagtatgttttgccaggtgtgaatcatgcttaaaagccttgtcgcaaaccttacatttgtatggtttctctccagtatgaattatcctatgtatttcaagatgtgatttgcaactgaaaactttctcacattcttcacatttgtaaggtttctctccagtatgaattctcctatgtcttcgcaaatgcaaatgaaatcttgattcaagctgacctttaataggcttgtttccagcatgcctttgatcatatcggtctgtactactagtcaacttttttatttctgtcatgggtgcttcatggtcatttgtttcatcttcttgccactgaaacacaaagtcatgaatgtctttctcaatttcctgggagcaaaatgctccaatgtgataacttgcttgtctctgcaatgtccctgtgtggatcacttctgtattgccttgccctgttgatgacaatgtattcatcatgcatttggaagagatatctacaaaatataaacaccaataggtttccaattaagtacagatggtataaaacactgaaatgtataaatatcacacacacacaaaaatacttattttaaacttcccaaacatgagcttcaaagtttaggaacacaaaacaagtaagattctttaataaataaaggccaattacatgtacttcaaatcatttttacagaagcctatttccaatatcatgacaaaacactgacagggcacaaacacacataagcctaaagtaaggagtatttttccactttaatcctaaggggtatcacacagtgcaaaaaatatatcactgtcacatcaaagaagagaaaaatatgtattcttcatatatacagtatatttagtatacagaaataaatgttaaaaaaccagacaatgtactatattggtaaataatccacaacaagctcttgtaaggataatcaaaatcaatggaaattctgtattatcaaacaatcatagcactgagaagataagattacaaaaattagccaggtgtggtagcccaccctgtcgtcccagctactcaggaggcttaggcacaagaattgatttaagccaagatgcaaagtttgcagtgagcccacatcgcaccactgcactccagcctgggtgacaaagtgagactctgtctcagaaaacaaaaaaaggcagggggtggtggctcgcgcctgtgatcccagtactttggaaggcggaggcaggcacatcgcctcaggttaggagtttgaccaacctggccaacatggcgaagccctgtctctgctaaaaatagaaaatgtagccgggcatggtcatgggcagctgtaatcccagctagctgaaaggatgaggcaggaaaatcacttgaactcgggaggcaaagattgtggtgagctgagatcacaccattgcactccaccttgggtgacagagtgagactccgtctcaaaaaaaaaagaaaatgttaatagcatatttttctgaataactgttacaaaattacctatatccatgtggaacaggcatgttgtaacttaaaaaaaaaattttgtatttttatttttttgagatggagtctcactctgtcacccaggctggagtgcaatggcataatcttggttcactgcaacctccgcctcctgggttcaagcgagtctcttgcctcagcttcccgagcacctgggattacaggcgcacaccactatgcccagctaatttttatacttttaatagagatgggctttcaccatgttggccaggctagtctcgaactcctgtgaactcctgtgatctcgaactctggtgatccacacttctcggcctcccaaagtcctgggattacaggcatgagccactgtgcccagcggcagtttgtgacattaacgaagggagtgtgtcagttatattgaataccacataccaaaaactcataaaaggaagaaaataataagtcaatttatactgcctgcagaattctaaacaattccctcttaagaaaaaggccataacttgtagttaccacccgtacacaacataagaactgaaatacatgttaaaatcactaccttctgaagtatgaggtgaagaaaatacacagaattataaggaataagaattgactaatggccggccacggtggcacatacctgtaatcccagcattttggtaggctgagtcgggtggatcatgaggtcaggagtttgagaccagcctggaacaaatggtaaaaccccatctctattaaaaatacaaaaaaaattagctggacgtggtggcaggtgcatgtaatcccagctacttgggaatctgaggcaggaatcatttgaacccaggaggcggaggttgcagtgagccaagatagtgccactgcactctagcctgggcaacaagatgagattccatctcaaaaaaaataaaataagataaataactacttctcatataagctttggtagatgtggtattctctaataggatgttcctgcagatgcagactttgagagaatttagtcatgggtgttgactcctcatgaataggactagtgcatttatagagacattaaagagctcattgcctgttcctctttctaccatattgggacatggcaggaagatggctgggctaaaccgtgaagaagcctctcaccaggaatcaatttggctggcaccttgctcttggatttcccactttccaaattcatgagaaataaatttctgtgtcttaagcttcccagtttaagctacttcctttttcgtttattcttcagatcgagtcacgctcttatcacccaggctagagtgtactggcaggattctcctacctcaactgattctccctcctcagcccagagtctcactctgttgcccgggctggagtgcagtggcgtgatctcagctccctgcaacctccacctcatgggttcaagtgattctcctgcctcagcctcccaagtagctgggattataggcgcaagtcaccatgcacagctggtttttgtggttttagtagagatggggttttaccatattggccaggcttgtcttgaactcctgacctcaagtgatcaacctgtctcagcctcccaaagtgctgggattttaggtgtgagccactgcgcctggcccatttttggcatttagtacattccaggtttcaccatgttggccagactgttttcaaactcctgacctcaagcaatctacccaccttggtctttgaaagtgctaggattagaggcatgagccaccgtggccagtcagtctaagctatttctaacagtgaaatgacagagaaaggaacaggagcatctcatcatcaacatcaccacaggctgacaaatcttattaaacaaaggatgtttagggtctctactataaatcttgcaatacttgaagccatctaatagcactaacatgttttaaaaaccttgagacatgtagggcatggtaatcccagcattttgggaggatgaggtgggagattcctgaggtcaggagatcaagaccatcccagctaacaaggtaaaaccccatctctgctaaaaaaaaatacaaaaaaattagcctggcatgttggcactcgcctgtagtcccagctacttgagaggctgaggcaggagaatcactggaatttgggaagtggaggttgcagtgacccaagatcacaccactgcactttagcctgggtgagagactgagactgtgtctcaaagaaaaaataaataaatgacagaaggctaaagaataactccaacccacaaacatatataaagttctccagtaaaggtaaataaaaaaaacgggtaggctgggcatggtggttcatgcctataatcccagcactttgggagggcaagccaggcggatcacctggggtcaagggttcgagaccagcctggacaacaaggagtaaaccctgtctctaccaaaaatacaaaattaggccaggcgtggtggctcatgcctgtaatcccagcactttgggaggctgaggtgggtggatcacaaggtcaggagatcgagaccatcctggctaacacagtgaaaccccgtctgaactaaaaataccaaaaattagccaggcatagtggccagcacctgtagtcccagctactcaggaggctgaggcaggagaactgcttgaacctgggaggtggaggttgcagtgagctgagattgcaccattgcactccagcctgggaaacaggagtgaaactctgtctcaaaaaaataaataaataaataaaacaataaaaatacaaaattagctgggtgtggtggcgcatgcctgtaatcccagctactcgacaggctgaggcaggagaattggttgaaccggggaggtggaggttgtggtgtcaagattgcagcactgcacttcagcctgggtgacaagagcaaaactctgtctcataaatacataaattaattaattaataaaaggacagatacagaaactcgcatacgtataccttttcttcataactaaactttttttcatattattaaaaatgaaaatgtatgaaaaaacactgtacatatatgttaacagaaatgcaacatacacaaaaataactctgacaaaaataaaaaagttctactggagaagaagtagtttttgtaggttatggaatttttttatttttatttttatttttttgacatggagtctcactctgtctcccaggctggagtgcaatggtgcgatcttggctcactgcaacctccacctcccaggttcaagtgactctcctgcctgagcctcctgagtagctgggattacagctgcccaccactgtgcctggctaatttttgtaaatttagtacagatgaagtttcatcatgctacccaggctggttctgaactcctgacctcaggcgatctgcccacctcggcatcccagtgctggaataacaggtgtcagccactgcacctggccaggttatggaaattttaagcttcattattgtgctataagtttaagatgtttaacatacctgcaacaataacctctccccatatatcaatacaacgcacttcacttctgcgtactgaacggaatggacactaatgtggttgttatattcacactggaatcatgtttaaaccacttatgtttactaagaactaaaagacaaaactatttaaaagaataaccatggttgggcatggcagctcgcgcctgtaatcccagcattttgggaagccgaagcaggtgaatcacttgagataaggagtttgagaccagcctgaacaacatggtgaaaccccatctctactaaaaacacaaagtgagctgggcatggtggtgagcgcctgcagtcccagcctccaagaaaggtggggcacaagaatcctttgagcctgaaaggcagaggctgcagttagccaagatcgttccactgcactgtagcctggatgaaagagtgaaactatcaaaagaaaaagaaagaaaagaagaaagaaagaaagaaaagaaagaaagaaggaaggaaggaaggaaggaaggaaggaaaagaaaaaacaaaacaaaagaaaagaaaagaagtaaataaggaaagagcagagggataagtgagggcaaagaaagatgtcccttcagagatctcaggattgaaacttttcttttgccacagaattctcccacttgcagagagtttccccacacactatttgaaggtggagcttccactctgcccatctgagctcttacctgcgtttacacctgtaatacattcccacccatctggagttttttgttattttcacttaactctccacagtccagggctctttcccttgctccaacatggagataacaggtcagaaagagactcgtgcttataaaaagaaaggaccatgatgtgctggagcttttctagagtcccagccctatatttctgtaggaaagaagacattacaggtggatctaggaaaatatttcacaaattcctccactgactgcctcattctgaatgctgttggagcactgtaatatgtaatatgtggacatcgggctatcttccaagaactaatgagttgaaagcacaggagaagcaaacagggaactggatatgtttaaagtctaccataaggttttgtttttgttttttgagacagtcttgctctgtcgtctgggctggagtgcagcggtgtgttctcggctcactgcaaccttggcctcctgggttcaagcaattctctctcctcagcctttctaggagctgggattgcaggtgtgcaccatgacgtccggctaatttttgtatttttagtagagacagggtttcaccatgttggccaggctggtctcaaactcctgacctgaagtgatccacacacctcagtctcccaaggttctgggatgacaggcatgaaccaccatgcccagcttgccataaggttttatgcctactttagttctggaacccacattgaggtatcatgaagaacgcagaacatctaaacaaaggggacagtgaaagtccagatgctacatcatgaagcttttcatttcaaaatcaatacagcttccattttagtcaagcaaggatgcaactcccaagagaaacaagagaaaatacaaagatccacaagggcacatccccacttctggagggaagttatcctcacccagggagaccaggttcctataattctccagcatcacgtctctgtatagagtcctctgagcagggtccaggcatttccactcctcctgagagaattctatggccacatccctgaatgtcagtagaccctgaaaggaaaacacattttaagcaaatggttatgggaggagatcttatctttacagaaaatgagaagaggagaggggaaagcatggatttaattgcagagaatgttccgacaaatccaagtaagggattcttcaccacatgatgtcttcccagtggtgtttgattatactttctgaagagctcaggataccctctcagtatgaattgcttacgttagaaataaataattagccgggtatggtggcaggcatctgttgtcccaactacttggaaggctgaggtgggaggacggcttgaccttgatggtggaggtttcagtgagctgcgattgcaccaaggcattctagcctgggcaacaaagcaagactctctctcaaaataaaataaaatacatgaaagtaaaattacacaaagcacaaaaatccattttgtaaatgttcacaaaataataaaacctacacagactgaaaaaaaactagatgttaatacaaagggttgtcatttgtcccagattttcaaaatataaaagattttcaaaatatatacgtgtgtgtacatatgtatgtatgtataaatgtgtgtgtatgtgtgtggggatgtgtatgcatatacatatataggttttacaaatataaaaagtagcaagttttgcagggcgcagtggctcacgtctgtaatcccaacactttgggaggctgaggcgggtggatcatgaggtcagcagtttgagactagcctggccaacatggtgaaaccacatcttaactaaaaatacaaaaattagctgggcgtggtggcacgcacatggagtcccagctactggggaagctgaggcaggagaattacttgaacctgggcggcggagtttgcagtgagccgagaaatcgccattgcactccagcctggtgacagagtgacactccgtctcaaaaaaaaaagaaaaaaaaagtagcaagttttgtttaactgaagaggaatctcatcttgctggaaaaggatactttggcagctgctggtgggtggaatctcatcagatctagggaaacaggaaatgccccatcctagatgaatcaattacccttttaactgcctggcctggaggacagagaatggcttgaattcgggaggcagagggtgcagtaagccaagatcatgccactgtactccagcgtgggtgacagagcaagactccatttcagaaaaaataataataatagttataggtggaataagaatatggctttatcctctaggataaaaaagaagtaccgctgccatatttgagaaaaattgtaaccagttttaccacaaacacctgtttcacaagcctctccacaggaaccccacagtctccatgagcgtaatgtgctaagaatggtctaacgaatctcctgctattatttaggttgatttcctattcttaaaataatgataggatcattcttgtatcattcatatctatgtatgaagtttccattctaattagtaagattttttgagtcagaaacacagtaagtcactcaattacctaaaaatgtactataatgtcaggcagaaaagatttcctattattggtctctctttctagaatttaccatgcactttgtgcacattaatatgtgacttccattggcagctgctctaatcctggtccacggagagctgacagagcatccagatgtggcccctgaacaatccctgctacccaacagcactgacaccatgggaccctcaccccgtctccatccatgtctgggtgtgagtccttcccaggaccatgcccagtgcagcctcttcccaacttcatgtcacttggtcacaggagataaaatctaagtgagataagagggactgagggaaggcatgggtgattgtgagcaaacctgtcaggcaggatgcttcagactaagagaagattcccaactccaggcgccagcatttctgaaaggaaggagacagaacaatccaccgagaatatcatctcacctgagaaagagccatccccgactcctttgctttcctcttcctcttctgggtttcttcctcaggtaccaagagtctttagaagtcaatcctaaatgttagaaatatgttgtttatcactgagaatcaacacaccccctccccataacacaatgacacatacaaaggaggcctcaccctgggaaatatggtcccctctgctgcccactgccccagggatgataaactcctacaggaaaactcccactaccctactggaggagtccacacacacgctgcagcagtggggagctgggctgggatgagctccccttcagggcacagactcagacctaaccaaaccccacacagaggctgggtgtggtggctcatgcctgtcaccccagcactctaggaggccgaggtgggtagatcgcttgagctcaggagtttgtgactagcctaggcaacatggtgaaaccccatctctacaaaaatacaaaaagttaggaaggtatggtggtgcacttctgtgtgtctgtggtcccagctacttagggagctgagatgagaggatcacttgtgctcaagagttcgagaccagcctggccaacatggtgaaaccctgtccctactaaaaatacaaaaattgggccgggcgcggtggctcatgcctgtaatactagcactctggaaggccgaggtgggtggattacttgaggtcaggagttctagaccagcctggccaacatggtgaaaccctgtctcttactaaaaatacaaaaagtagctgggcttggtgggcatctgtaatcccagctactcgggaagctgaggttggaggatcacttgaacctgggaagtggaggttgcaatgggccgagatcgtgcaactacactccagcctgggtgacagagtaagacttaaaaataaaacaaaacaaaataaaataaaataaaacaaaactacaaatacaaaaattagccaggtatggtggcgggtggcacgcacctgtatctcagctacttggtaggctgaggcacaagaatcacttgaacccaggagacagaggttgcagtgagccaagatcaggagactgcactcacagcctgaaggacagagtgagactctgtttgaggaagagaaaaaaaaaagcgtttctgatgtgatagagataataaaacctgagtaacatgatagagattgatgggcagagggaatttcagatgggggtgggagggcatgggagacagctctgagcctagacctgaaggagcagaaagggagatggctgtgatcatttagggacatagggtaagaacggggaaaatgacctgagacaggaagggttttgatgtttggggaaagagataagcaaatgtgactggggcggagggagtcattagattagggcaagctcccaggaggaggctggacactggcaggggccctggacacagggctgtggagccacactgatgagttgggcttttgtcctggggaacacgggaagctggtggagggttccctgccagggactgatgtgacctgctttacatttagctgtgatatcctcagagtggggacatattcaccgagttaccctgagaaggtctgagatgagtgagaaggtgtgtctgaattcttacatgggggcccagaagggctaatggaaagggttggtcttatcacctctctttgaaaattagagaagcatctttcacatacctgggctaaagaaacttcttttgcaacgttctgatgctattgactttcaacatttaattcttcttacaagaaaattatagtaacatatataaaatgcagaagtgaaaacacacagctactgaccttgaaaacagggaggccaggcagggtggctgaggcctgtaatcacagcactttgggaggccaaggcaggcagatcacctgaggtcaggagttcgagaccagcctgagcaatatggagaaacccccgtctctactaaaaatacaaaaattatctaggcatggtggctcatggttgtaatcccagctactcaggaaggttgaggcaggagaatcacttgaacccggaggcggaggttgcggtgagctgagattgcaccattgcactccagcctgggcaacaagagtgaaactgtgtctcaaaaaaacaaacaaacgaacaaacaaaaaaagaaaatagggaaagagggtcagctgtagaactactatataagcaaatgttttcaatcaagaaaacatgggtggccagatacagtggctcatgcctgtaatcccagcactttgggaggtcaaggcaggtggatcacctgaggtcaggagttcgagaccaacctggcaaacacagtgaaaccctgtctctactaaaaatacaaaaattagccaggctccatctccacaactcatttaatctcttgctgctccttctccccaatctttagatcatcctcaatctctatagatttccacctcttctcccatctctgtgcatcctctgctctccctgttaaattgtctcttccttgttatacctccctggccccactctctggcaccccagatccccaggtgtcctccctgctgtgcttctccctctgttctccttgccaccagcaccactctgctctgtctgccctggctccaaatccctcctcctctccctcactctgatgagactccctctttgctgtccctctccctaccttgctgtccttcatctctctgtacatctagcttttctctacatttctccagttgcttttctcctcctgctttcttattttttttttcacttttgctgtctcttggcaaatccctcacccatcttctactttgccatctgttatgggcctttctcattcttcttttctctgtctcaggttttttactgctctctctctgtctcctgatccctttggcccacacaatcacaggagggtttggacaccttcatgtcagaggagcccattttccaggggctggcactgggcagggaagaacaccttgtgtcaccatataggccccaggcacctccccaatgcgggcctgggcaacagagcaagactttctcaaaataataataataacaataataattatgtatatatattgcaaatgctgtgttttctacgtaaaccatgggcttggccacacgcattacctcatgcctgtaatcccagcactttgggagggtgaggcggtggatcatgagatcaagaggttgagacaattttggccagcgtggtgaaacccgctctctactacaagtacaaaattagctgggcttctcggcacgcccctgttgtcccagctacttgggagactgaggcaaaagaatcacttgaactcgggagtcagaagttgcagtgagctgagatggcaccagtgcactccagcctgtcgacaaagtgagactctgtctcaaaaaaaaatcatgggcttatccattaatgcacttctgcacatacttcaaattacatccacacacacttaaattaacttgcgttcagaaggtataagcaaaaacctggagaggacacaaccaaagctactcaccaggctgaggtgggagaattgcttgagcccggagagcagaggttgaagtgaatcaagatcgcacaactgccctccagcctgggggacacagcgaaactccatcacctccaccccccaaaaagttggaagctcactgaattaagatacaacttcaagaaatcataaaagcaatgcatgaagaacatgagaaggacaaccaacatacagaaattatgacgaactacacagaaactctcgggataaaaatacagtaactaaatggaaaaactcaatacatgggttcaaaatcagaattcattatgtaaattaaaaactagtgaagaggggtcaggcaaggtggctcacacctgtaatcccaggactctgggaggccgaggtgggtggatcacttgaggtcgagttcagagaacagtctggccaatatggtgaaaccttgtctctactaaaaatacaaagattagctgggtgtggtggctggctcctgtagtcccaggtactctggaggctgagtcaagagaagcacttgaacatggaaggcagaggttgcagtgagccggattgccccactgtactccagcctgggtgacagagcaagactgtctcaaaaaaaaaaaaaaaaccaaaaaacaaagaaagaaaattccaggactatcttttatacacctgagcaaaaggaatgtctctctccatgtctaaggttctgatggcatgaatcctaaacatgtaattattttcccagaaatatgacagtaatacgttcaaaataaacacaagtgtgaacacatagctataggtgtttaaaacactgaaagaggccaggcgcggtggctcacgcctgtaatcctagcactttgggaggccgaggcaggtggatcacgagctcaggagattgagaccatcctggtccacatggtaaaacccggtttctactaaaaatacaaaaattagcctggcatggtggtgtgtgcctgtaatcccagctactcgggaggctgagacaggaaaatcattggaacccgggaggcagaggttgcagtgagccaagatcacaccactgcactccagcctgggtgacagagtgagactccttctcaaacaaaacaaaacaaaacaaaaaccaaaacaacaacaacaacaaaaaacactgaaagagaggcaatggtagtcataagctgtaagcaaatgttttcttcatgaacacatgggctctgctggaacaaggttccaaaacaatccagcccatcgttcaacatctgcaaggaatattatgaaccagaggaacttgagggagacatttacttagaagctcacagctcaccattttatcagatgacataaggaaagaaaatagaataggctacttgaaccaaattttgatgttagcgtaaagaagaaaggtcctggggccgggcgtggtggctcacaccttaaatcccagcactttgggaggccgaggtgggtggatcacctgaggttgggagtttgagaccagcctgacaaacatggagaaaccccatctccactagaaatacaaaattagcttggcgcagtggcacatgcctgtaatcccggctactggggaggctgaggcaggagatcacttgaacccaggaggcggaggttgtggtgagccaagatcgcgccattgcactccagcctgggcaataagagcaaaactccatctcaaaacaaacaaacaaaataggtccttgatatctttataaagtacacattgaaacaacctaaaattggccaggcacggtggctcacacctgtaatcccagcactttctgaggctgaggtgggcggatcacctgaggtcaggagttcaagaccagcctggccaacatggtgaaaccccgtctccattagaaatacaaaaattagccaggcgtggtggcaggcgcctgtaatcccagctacttgggggctgaggcaggagaagagcttgaacccaaaagacggaggttgcagtgagccgagatcgtgccatcacactccagcctgggggtagaagggagactttgtctcaaaaaaaagtaagaaagaaaaaaagaaacaacctaaaatcatttatcaggtactagtaaatgcttccaatatatgatacagactagaaagcatgcagtcttctatgtaaactgaacacaacaaatttcatagagaaacttttaaaatggttaaaaatatatacatctaaaaatgtatatatctaataaaatgtagggtcaaagaagaaaattttgaactcatatcatagttggaaaacaatgatgtgagctcataagattctaccaaagcttatttgaaaagtagttatcttacttttttcagacggagtctcgctctgtcaccccaggctggagtgcagtggcatgatctcagctcactgcaacctccccctccctgtccaagggattctgctgcctcagcctcctgagtagctgggattacaggcgcccgacatcacacctggctaatttctgtattttattcgacacgagatttcgccatgttgactaggctggtctcgaactcctgacctcaggtgatctgcccgccttggcctcccaaagtgctgggattacaggcatgagccattgcacacggcctttatttttatttatttattttttaattaagaaacaaggcgggcatggtggctcatgcctgtaattccagcattttgggagggcgatacagctggatcgcttgagccctggagttggagaccagcctgagcaacaaggcaaaagcccgtctctaccaagtacacaaaaattagcgcggtgtggtggcgcgcggctgtggtcccagctactctgcaggctgaggtgacaggatcgcttgagcataggatgttgatgatgcagtgagctgtgatcctgtcaccgctctcccgcctgggcaacagagtgagaccccatctccaataaaaaagaataaaaaagaaatacctgggtcctgggtctgggggcagcgaatctaaggccaattaaggcaaactttctaaaactagacaaaaaggaaaaaccccatctccccatccggagtaacaaaggatcaaaggccgctgtccctaccgccctcctccttccaccacgtctcagaaagggaaagagcccaggagtggccatggccaagcaccggccacaccttcatctgcatagggcacccatctgctccggcctcgggccaattcacctcagcatttcgttggccaagggccaaaaatccttcatccagataaggggtagcccatagggacctcaaaataaatactttaaccccctaaaactttctaaacgggtccccggagacgctggctcgggcccactcccctctgtggagtgctttcttgattgcatatattcgttttccaggagttggaactaggtagcaacaccgcacaaggagggaggtggggagcgacggagccttcggacaggggtggcgtctgcaggatcttaggaccaggcagaggacgcggcctcccgggaaccggggttgaggcgcggcgctcctgaagccgccgagagcgacggtgggaggcgcctagggctggaatccagctcgcgggtgaggacttgaaacagcgcgaggcgggaggacaggtcaggaagggttttgagaaggaaaattccgcgataggaggtgtctgcacgaccccactgcagaaagaccgaggacgggacctgcctcagggccactttaaactcgaagggactcacggactctcacccggacgtctcaatttgctctgggttgagaaagaggggccgcaatttccaggtctgtggggactcaacgtccccggtatagcagcaccacaggactgggaagcacacataaaacagagcgaaactcacgcgctgtggtgtgaccttcagtccctgccatccgcttccgggtctatgccaatcagcgcaggacagaggccaggcctgggcgggacccccgagaaggtaggcggggcctggactaggccgggatgagacgcgaagaggtgggcggggcctgaacaaggccggggcggggttgagaaacaaggggcctggctgggagaagagtcctgggctatgaggggtcggcgggggcgagaagcgggtgggtcctgagctttcctccatctcgctctctgcgccttttttccaggttttggaggcgaaagccgccagtgaggctggagcagctcagcagtcattgaaatagtacctccctgagaagtcaacgtgaggcggtcattggacccaggaaagttccttgctattgaaattaattttagcaatttatgtccaaaatctggaagttgtcaagggaaggaatgcaaactagaatgcgaaatacaaagctctgcctcagcgaaacctccaatttcctgctgacggcccacagaacagaatagcaaatcctctccctttctattttccattcactggggtgggagaatccaccctgtgctcagctccagagacttcctcagggccaccgcctggggtgcggagcggaggcctcaggccagggaggagtgaggtcaccacctcctgcttaaacacagcagggatgtgggcgaggtggcgagtctggggtcccggctactcaggaagcaggagccgcaagaccgctgagcccggaggtccaggccagcgtgggcgacaaagtaagaccctctaccccagagctccttcctccgcctcaataagaaaaaaagggatttttaaaaaaagcattgacattgtaacagtgtgtagcagggctagcggcagacaaaacttctcagacactgagttgtagaaggaagggctttattcagctgggagcgtcagcaatctactgccttgaaatccgagctccctgaatgcacaatttctgtcctttttaagggttcacaacactaaagatttcacatgaaagggtcgtgattgatttgagcgagcaggcggtacgtgacaggggatgcatgcaccggtggtcagagagaaacagaacagagcggggagttttacaatgttcttctatacaatgtctggaatctatgaataacattgggttctaagccataagttgatttttaactactgggtttaggccaggcaggcccaggcctggtttcgggcctggccccggggctgcctgtctttggttttactttcttgttgttttttcttaaaacaggtactgagtataaaacaatatgagagggtctctgtcttcctttatttcttctttttgagagtctcactttttattagtgggagttcttactcttgtttttgctacttatgtctttttgtgtaatagattgatagtgattcatatagtacacttgtgctgaatcattttggtgaactaaggtagcgatgaagctttttatcatttgaagaggtacaggtagcaaacaagagagcagtaagcagctttttattactattataactcttattataagagttttaaatcctcctattgctgggaactaatttttaaacatggctcctggattgagtccgtgccacacctgtacgggtacatgtgtcagttttgttatatttttaactatgtcttcaactactttcctctgatgatctatgtgtagacaacaattagtaaggttaaattttctacaaacttttccttcagctgctagcaagtagtcgagagctagtctattttgatagatagcatttctttttctttttttggtgatggagtctcgctctgtcacccaggctggagtgcagtggtgcagtctcagctcactgcaagctccacctcccgggttcacgccattctcctgcctcagcctccctagtagctgggactacaggtgctgccaccgcacccggctaattttttgtatttttagtagagacggggtttcactgtgttagccaggatggtcttgatctcctgactttgtgatctgcccgcctcagtctcccaaagtgctgggattacaggcgtgagccaccgcgcccggtgatagatagcatttcttatcagagtctcttgccgggcaagaacagtcaaggcttgaccggttttattagtaataatttttaaaacagcttgcaactgtatgattcggttgagcatgtagatgggggttcgataacctcatgagctgtcttgtgtctaagtggcaggcttacagtattatataattctttaggaggtcatttatcatctttctaattacctatggctatgcttcgtttttcacaggaagcatagactgggaagcctagaagttcacctgtatttatgggcagtaagaggaaagatggcttactggtgccaattacacagctacctgtccactgatcaggcagcttagcatgagctctgtctatgtatctggtataacctggtgggggccgtctagtcctggtggaattccgggtgggcctcaacagtctgcaactttggaaatttactgaatggatttctttttgtgtaactggaactttagtatgtaactgtttttgtggtactattatacaacttttgcctaagacaactaagccgccttacaggatgatgagtgaatttttttctttctctagctatgcaataccgtctaataattgagacttttagaacttaaaaattgtcagggtggttcttttgggctgggaattcatcaggaactgggtttgtaggaactaattctcgggcttcctatggccattgatctcttgttacagttcttctacaaacataacatgaggtgacttgtagagactgggcctcatgttaggctaattgcaaaaacaaatttttagtttttcctggaatcttaggtactggcacatttatttcatcatagaaagcctgaaatactggttctggagagcatttttcaacttctttttttattaggatgtttacgctaggatctagttttttttcatcaatgcttaatttacattttttttttaattgtactttgggtctgatgggtttgtgattatcaattttaaaaggctgcagcccccactcatgcaagaggggctgacttttcttttttggagctaaacaggattatttttatcttctttttaagtagcccaaatgacataagactagtattgacacatctcacataaatatgattcttgacagatatacttatttttttttttaactgtgtaactttttttctaatttagagaactgcatcttattctatgctgcttactatcaatagtggcacaagcatcaaattttaaggttatatttttggggacccctcttctgttctagctattattttacttgtgtcacttagaaaaagactagtctttaattttattttaaaaactgtaatcatgggaggcttaaaatgggttataacacacatcaggttggttattccttgggctacatactttggatagaatagcattatacaaacaaatttcttttagaatcctggtacacttataataactataaaataataggactgtagcaatcttttgtctaacttcagtgacttgatgtagatactggaaacagttctttgtctgaggaaggtcagttgaagtccttactgtacaagtctaaattttaaggaaaatgagtcctgcgatgagtttcttcctgcttcagtcgtgcgtggaccagtcagcttccgggtgtgactgcagcagggcttgtcatcttcttcagagtcactttgcaggggttggcgaagctgctcttatctacgtacagctcctagtctactgatgtttaagggtggtctcagaggttgggcccactagaataaactgagtccagcacctctaaacagttatgtttaactgggctctttgatactaggagtaaggtggcggggttagggtgttgcaaacttcaatggttatgtggggattttcacagagcaagctttggtatctagttagtctagcgtttattagctaatgatgtcttttgttatttattaaagggactttatgtttatgttttgcctaagagttagcttatctgcttcttgtgctaacagggccattgctgccagggcccttggacatgggggccagccttgggaaacctcgtctagttgttttgagagtcaggctactggccttggccagggccttacagtctgggttaaaacttcaactgccatttttttttttctttctgacacatagagtgcaaagagttttgtcaggtcaggtagcctcagggctggggctgacatgagtttttcttttttttttttctggttgatgaaataccagggtgaaatggactaaaccataagtgccactctagttattcggcagagtgcctactaaaggtctactacaataccaccacacatctgctcagagatgaacaagggctgaccgattgataagctcttgaaaattcttaagctcactgcatcctttcaggtctccaaggaatgctaaatctcctctctgccgtgagatacaagaagtgaacttagtattgggagacggaagctggaaggccctcgggggctgatccgcagggacttcgggatatagcagagagagctatatgttactccaggctgtagaatcctggaaaagagctaccatgcagcccacacctggtcaactacaggaccaccttagtggaagggggacaatcagggcctctggcctgccatgtgcacaagcataacaattgcttttgtttaatgtgcagatggaatatttgatctatttcaaccaggcatttgcatcttggtatgctgtctcaattgccaaagtttgttttaagtctttaacttctatcatcctctagtaaaatgaatgcttcctttagcaccgatttttattagtttttagaccaaagaaagctgaacaccattttatatttaataatgcttcttgtatgatttttataccagataagctaaattttacttttatattagtgtgttactaatgttaaatttaattttaatgaaactttgtagacatatttatctaatttttcatgtttgaccataaggttagattttgtagactctttttaactttttgtaatttttgttaaagagcaggttgatgctttaagaaaaaacctgttgcatttttactttgatgtccgtttcacagaaaaactggatgatacctttttaactttagctaatatgtttacacacagaattttctttacaattaatgttttaaaacttgcttaaactttcaaacaataatttttttaactttttaatataggtaaaaatccacattcttatgcctccttataatctttttactataggtatattttacttttcttatacaccttgtacataaactgtttcttcaataataggaggccttattacttttaaattatacattttttgcataaaaaaattttttaaagcaaactttatgtctttggactagactgtctaaggctaccagattagaagttactataatacatgctacgctgttaacttttagcaaacttcacttttgttgaaaaccttgtaagtttgggacttcaattatcctttgctattaataagaccttgtttagtctaaattaacttagaattggtatagatggcctctttttctctctgctggtcttttcttgcctctgccagccacttatgctgctgttcttttaactactgtggggggcggggggaggaggtctaaaaccaggtgtaactgtctgtgtactgaaactggtctgggtgccttggcttacaggttaccttgtgccatatctttgaaactagggacccatccaggcttccttctgatggctaacctacctcaaatgctggccagtctatttcacacaaagttctaagttttcctggggtcacagttacaccataatctcctttaaattctttcttgaaattctttaacatatttcttagtggggtgggcttactttgtgcctgaactatgttttttttttcttctgagacaaaatgccatgctcacaccacacatactcaccacaagaatgggtaaagagggcacacacacgcacttttaccgtttataccaaaccaaaatcatgaaattcaaaatctgagtactaaaaaattcaagccaagtcaaaaccaaaactaaagtatctaacaattcaaatcaagtcaaaaccagaacaaaagtgccaatgcaggcatgctgtgggtgatcaggccacgcttccactcagatggagtggggcaagttccaaagactagtcttactaagtaaagccaagtcaaaaccaggacaaaagtgccaatacaggcatgctgtgggtgatcaggccacgcttccactcaggtggagtggggcaagttccaaagattagtcttaccaagtttcagatgtctggactccaagtgccagttccttcctggtgttcagccactgcgttaatcctccgtgggggcctgctatgcaccgctctggcgaggcattccattggggcaatttcctacccaggagcgctctttggatcgtgtcactcaggctggccagagtcccccgcggggatgctccacagggcaggcctaagccacctaaagggctgcctcggccatccatcagttacctcattttcaggtcagggaaccaagaaaagtagcaggatgagcctcagacaaaacctctcagacactgagttgcagaaggaagggctttattcagctgggagcatcggcaagctactgccttaaaatctgagctcccctaatgcacaatttctgtcctttttaagggctcacaacactaaggatttcacatgaaacggtcgtgattgatttgagcaagcagtgggtatgtgacaggggctgcatgcaccggtgttcagagtggaaaagaacagagcagggagtttcacaatgttcttctatacaatgtctggaatctatgaataacatcagtttctaagttatgagttgatttttaactactgggtttaggccaggcaggcccaggcctggtttcaggcctggcgccgggctgcctgtctttgatttcacttccttgtttttttcctaaaacaggtactgagtataaaacaatataaaacaatatgagagggtctctctcttccctcaaaactactaaataaattcagtggatttgcacaatacaatatcggcaccaaaaattacttgaatttccacacattaacaataaacaattttaaaagaaaatttaaaaacacttccatttgctagagaacttaaagtaagaaatacttaggaataaacgtacaaagctgagaagtttgtaccttgaaatctataaatgttgatcaaaatgattaaaaacatacatagagatacaacccatattgatagtttggaaaaattaatattgttaagtaattatataacccaatgtgatttagattcaacacggtacccataaaaatgcctatcagttgacattccaccacaaaagaagtgaaattggctggtccctgccttaactgatgacattaccttgtgaaattccttctcctggctcatcctggctcaaaaactcccccactgagcaccttgtgacccccacctctgccagccagagaacaaccccctttgattgtaactttccactacctacccaaatcctataaaacggccccaccccatctcccttccctgactctcttttcggactcagcttgcctgcacccaggtgattaaaaaaaaaaaaaatctgtatctgtttttgttaaagaaacaaaaaacaggctgggaaaagtggctcacgcctgttggccacactagtctcaaactcctgacctcaagagatccacccaccttggcctcccacagtgctagcattacaggtgtgagccaccgcactcagcctaatcctcttaacataaacactttaatgtcaattaatgcttgaactcaacgttaagtcaactcaaactcaagtcaatgctgaactgactctagtgtcaattaatgcttgatggtttgctatactcattgcattcggaactattatctcaaaaataaattttctgatattctgcaaggagtgatctcagactgaagaccttgccacactgatgacatttgtaagatttctgtccagtatggattctttgatgtctaatgaggtgtgaacgtgaagtaaaggctttgctcacaatcatcacacttgtgaggtttctctcctgtatgaattctcctgttttgcataggatgaagcttgactgaagaccttgcctcaatcatgacatttgtaaggtttctctccagtatgagttcacccatgaactacagcgtatgaacgatgtctgaaaaatttgccacatttactacacttgtaagatctctattcattatggattcttcaatgatttgcaatggttgtagcgttactgaagacttggtgacaatcattacattagtcaagtttccctacaccatggattgcctgatggtgaataagtgttgactgtgcacgaaaggctttgccacactcactacacttgaaaggtttctctccagtatgaattctagtatgttgtgccaggtgtgagtaacacttgaaagccttgtcacaaaccttacatttgtatggtttctctccagtgtgaactctctgatgttgtgcaaggtatgaatcacgcccaaaagccttgtcgcaaaccctacatttgtatggtttctctccagtatgaactctcctatgtatttcaaggtgtgatttgatattgaaaactttgtcacattcttcacatttgtaaggtttctctccagtatgaagtctatgatgacatgcaagttgtgactgtgtcctaaaaaccttgccacattcattacacttgtaaggtttctctccagtatgaagtctatgatgatatgcaaggcttgatttgtgattaaaacttttgccacattcattacacttgtaacgtttctctccagtatgaatgaccttatgcattacaagagatgaattttgaacgaaggtcttgccacactcattacacttgtaaggtttctctccagtgtgaattacagtatgttgtgccaggtgtgaatcacgtctgaaagccttgtcacaaaccttacatttgtatggtttctcaccagtgtgaattctcctatgtctttcaaggtgtgatttgcgactgaaaactttgtcacattctttacatttgtaaggtttctctccagtatgaagtctatgatgacgtgcaaggtttgattgttgattgaaaaccttgccacattcattacacttgtaaggtttctctccagtatgaattgtcttgtgaactaagagggctgaattttcaccaaacgttttgccacactcattacacttgtaaggtttctctctagtgtgaattacaatatgctgtgccaggtgtgaatcatgtctgaaagccttgtcacaaaccttacatttgtatggtttctcaccagtgtgaattctcctatgtctttcaaggtatgatttgcgactgaaaactttgtcacattctttacattggtaaggtttctctccagtatgaactctatgatgacgtgcaaggtttgattgttgattaaaaaccttgccacattcattacacttgtaaggtttctctccagtatgaattgtcttgtgaactaagagggctgacttgtcactgaacgtcttgccacactcattacacttgtaaggtttttctccagtatgacgtctataatgacgtgcaaggtatgcttttttattaaaaaccttgccacatttattacacatgtaaggtttctcaccagtgtgacatctacgatggtgtgcaaggtatcgcttctgattaaagtctttgccacatacatcacatttatattgtttctctcctagatgaattatctgatgttttttaaagagtgagctacaattaaaggatttgccactctcattaaattggaaagatttttctttcctgtgtacatcctgtttctgtgtgagtaatgaagaatggaagaaattattcccatagttattagaaatatgggttttgggcctacaagaaattctttgggatgttgaaactgaggaagcattgttgatagacttctcaagttgattaccaattttcccttcgggctgaaatatgtgcagttcaggcagatgtgaatgaaagcttgatccaagctgatatttaataggcttgtttccagcatgcctttgatcatattggtctgtactacccgtcaactctttgatttctgtcatgggtgcttcatggccatttgtttcatcttcttgccactgaaacacaaagtcatgaatgtctttctcaatttcctggaagcaacattctccaatgtgatgacttgccagtctttgcaatgtccctgtgtggatcacttctgtattgcctttccctattgatgagaactccatcatgcatttggaagagatatctacaaaatataaacgccaatagttttccaattcagtacagataatatataatactgaaacgtgtaaatatgacaccaaaaacaatacttattttaaacatctcaaacatgagcttcaaagttcaggaacacaaaaggaggaagatcctttaataaatgaagggcgattacatgtacttcagatcatttctatggaagcctatttctaatatcatgacaaaacactgacagggcacaaacatgtgtaagcctaaagtaaggagtatttttccattgtgaccttaaagtgtgtcacagtttgcaaaaaatttatcactgtaacaacaaaaagaagaaaatatatattcttcatatttacagcatatttactgtatagaaataaatgctaaaggaccggacaatgtactatattggtaaataatcaacaacaagctcttgtaaggataaccaaaatcaatggaaatcctgtactgtcaaaccatcacagcacagagaagataataaaagattacaaaaattagccaggtgttgtggcccgtgcctgtaatcccaggtactcgggaggctgaggcacaagaatcactttaagccaagaggcaaaggttgcagtgagccaacatcgcaccactgcaccacagcctgggtgacaaagtgagactcgagtcaaaaaaaaaaaaaaaaaaaaggcagggcttggtggcccacaccagtaatcccactactttgggaggccgaggcaggtggatctcctcagatcaggagtatgaccagcctggccatcgtggcaaaaccccgtctctactaaaaatacaaaaagtagccgggcgtggtcgcgggagcctgtaatcccagctacttgggaggctgaggcaggagaattgcttgaacccgggaggcgaagatagtggtaaactgagatcgcaccactgcactccagcctgagcaaaaaagtgagactccatctcaaaaaaaaaagaaaatgttaataccatatttttctgaataactgttacaaaattacctatatccatgtggaacaggcgctttgtaactttttaaaaaaaatttttgtatttttttttttttgagatggagtctcgctctgtcacccaggctggagtgcagtggcacaatctgggctcactgtaacctcaacctcctgggttcaagcgagtgtcttgcctcagcctcttgagtacctgggattacaggcacacaccaccatgcccagctaatttttaaatttttagtagagatggggtttcaccacgttggcaaggctcgtctcgaactcctgacctcaggtgacccacatgtctcagcctcctaaatcctgggattacaggcatgagccactgcgcccgggggcacttttgacattaatgagtggaatctctcagttatattgcataccacgtaccaaaaactcacatgtaaaatcataaaatcaattaataaaatatattattaattcattaatcaaataataaaatactgtaacccatgataaaacaagcaagaaaataagtagatttatactgcctgcagaattctaaacaattccctcttaagaaaaaaaccacaacttgttcttaccaccagtacacaacataagaacagaaatacatgttaagatcactaccttctaatatatgaggtcaagaaaatacacagcattataaggaataagaattgactatggccaggcatggtggctcatgcctgtaatcccaggactttgggaggccaaggcgggtggatcacccaaggtcaggagttctagaacagcctggccaacatggtgaaaccccgtctcaactaaaaatacaaaaattagccgggcgtgtaatccccactacttgggggacccgaggcaggagaatcactcgaccctggaaagcggaggttgcagtgagcatagactgcaccatcgcactccaaccttggggactagagcgagacttcgtctcaaaaaaaaaaaaaaaaaaaaaaaaaaaagaactgaataacaccagggcgcggtggtgcatgcctgtaatcccagcacttttggaggctgaggcaggtggatcatgaggtcataagttcaagaccagcctggacaacatggtgaaaccccatctctactaaaaatacaaaaaaaattagctatgcatggtggcgggtgcctttaatcccagctacttgggaggctgaagcaggaatcatttgaacctgggaggcggaggatgcagtgagccgagaccatgctactgcactccagcctgggtgagagaatgcgactacatctcaaaaaaataagataaataactacttctcaaataagctttggtagatgtggtattctctaataggatgttgctgcagatgcagacttggagagaatttagccatgggtgttgactacctgtgaatactaaaagtgcatttataaagagacattaaagagctcattgcctgttcctctttccaccatgttaggacatggcaggaagatggctgggctaaaccatgaagaagcctctcaccaggaacttatttggctggcaccttgctcttggatttctcccttcccaaattcatgaaaaataaatttctgtctcttaagcctcccagtgtaagctatttcctcttttgtctttgagattgagtcatgctctatcacccaggctcaagtgtagtggcatgattctcctacctcaagtgattctccctcctcagcccagagtctcactctgtcacccgggctggagtgcagtggggtgatcttagctcactgcaacctccacctcctgggttcaagtgattctcctgcttcaacctcccaagtctgggattacaggtgcacagcaccatgaacagctaatttttgtacttttagtagacacgggatttcaccatgttggccaggcttgtctcgaactcctgacctcaagtgattggcccgtctcagcctcccaaagtgctggaattacaggtgtgagcaattgcacctggcccatttttggcatttagtatatttgaggtttcaccatgttgtacagactggtctcaaactcctgacctcaagcaatctgcccaccttggtctccgaaagtgctgggattagaggagtgagccaccacagccagcagtctaagctatttctttttgttttcttttcttttttttttttttgagacggagtcttgctctgtcgcccaggctggagtgcagtggcatgatctcagctcactgcaacctccatctcccgggttcacgccattctcctgcctcagcctcctgagtagctgggaccacaggcgcccgccactatgcccagctaattttttgtatttttagtagagacggggtttcaccatgtcagccaggatggtctcgatctcctgacctcgtgatcctcccaccttggcctcccaaagtgctgggattacaggcgtgagccaccgtgcccagcatcagtctaagctatttctaacaggacagtgaaatgacagaaacaggaaaaagagcatcttatcatcaacatcaccgaaggctgacaaatcttattaaacaaaggaagttaagagcctgtgctgtaagacttgcaataaatgaagtcatctaatagcagtaacatattttattttattttatttatttttatttttttaagatggagtctcactctgtcgcccaggctggagtacagtggtgcaatctcagctcactgcaagctctgcctcttgggttcaggccattctcctgcctcagcctcccaggttgctgggactacaggcacccgccaccacaccctaattttttgtatttttagtagagaaggggtttcaccgtgttagtcaggatggtcgcgatctcctgacctcgtgatccacccgcctcggcctcccaaagtgctgggctcacaggagtgagccactgtgcccggcctttatttttatttttttttgagacggaatcttgctctgtcacccaggctggagtgtcgtggcaagatctcggctcactgcaagctccgcctcccgggttagcgccattctcctgcctcagcctcccgagtagctgggactacaggcacctgccaccgcgcccggctaattttttgtatttttagtagagatggggtttcaccatgttagccaggatggcctctatctcctgacctcgtgatccgcccccctcggcctcccaaagtgctgggattacaggcatgagccaccgtgcctggccagcaataacatattttaaatacattgagacaggccgggcacggtgtctcatgccagtaatcccagtattttgggaggctgaggtgggaggatcacgtggtcaggagattgagacagtcctggctaacaagctgaaaccccatctctactaaaaaaaaaaaaaaaaaaattagcccagcatgttggcagtcacctgcagtcccagctacttgagaggctgagacaggagaatcgcttgaacctgggaggtggaggttgcagtgggccgagatcacaccactgcactttagcctgggtgacagactgagactctgtctcaaagaaaataaaaataaatgaaagaaggctaaagagtaactccaacccagaagcatatacaaagttctccagtaaaggtaaattaaaaaacagataggccggacatggtgactcatgcctgtaatcccagcactttgggaggatgagccaggcagatcaactgaggtcgggagtttgagaccaccctaacctacaaggagaaaccctgtctctactaaaaatacaaaattagccgggtgtggcgatgcatgcctgtaatcccagctactccggaggctgaggcaggagaattgcttgaacccgggagatggaggttgtagtgagccaagatcgcaacattacatttcagcctaagtgatgagagcaaaattatgtctcataaacacataaattaattaataaaaggacagatacagaaactggcatatgtgtaccttttcttcataactaaacttttttcatattatttaaaagtcatgaaaaaacactgtaaatatatgttaatgaaaatgcaacatatacagaaataattctggcataaatttaaaaagttctactggagaagaagtagtttttgcaggttatggattcttttttttttttttttttttttgagatggagtctcactctgtcacccagcctggagtgcaatggtgcgatcctggctcactgcaacatccacctcccaggttcaagtgactctcctggatcagcctcctgagtagctgggattacagctgcccaccacagtgcctggctaagttttgtaattatactacagatgaagtttcagcatgttagctagccgggttctgaactgacctcaggtgatccgcccccggctcagcctcccaaagtcctgggattataggcgtgagccactgtacccggccaggttacagaaattttaagtttcattattatactataagtttaagatgtttaacatacctgcaacaataacctctgcccatatatctatacgacacacttcacttctgcgtactgaaaggaatggacactaacgtggttgttatattcacactggaatcatgcttaaaccacttatatgtttactaagaactaaaagacaaaactatttaaaataataacggttgggcatggtggctcacgcctgtaatcccagccctttgggaagctgaggcaggtgaatcacttgagataaggagtttgagaccagcctggccaacatggtgaaaccccatctctactaaaaacacaaagttagttgggcatggtggtgagagcctgcagtcccagctacccagaaagctggggcacaagaatcctttgagcccaaaaggcggaggctgcaattagccaaaattgcaccactgcactgtagccttggcgacagagtgagactctgtcataagaaaagaaagagcagagagataagtgagggcaaagaaagatgtcctttcaaagatctcaggattgaaactttcctttacccacagaattctcccacttgcagagagtttccccacacactatttgaaggtggagcttccactctgcccatctgagctcttacctgcgtttacacctgtaatatattcccacccatctggacttttttgctattttcacttcactctccacagtccagggctctttcccttgctccaacatggagataacaggtcagagactcctacttataaaaagaaaggaccatgaagtgctggagcttttctagagtcccagccctatgtttcagtaggaaagaagacattgcagatagatctaggaaaatatttctcaaattcctccactgactgcctcattctgaatgcttggggagcactgtaatatgtagtatgtggacatcgagctctcttccaagaactacagaatcgaaagcacaggagaagcaaacagggaactggatatctttaaactctgcagtaaggttttgtttttgttttttgagacagagtcttgctctgccatctgggctggagtgcagtggtgtgttctcggctcactagaaccttcacctcccgggtttgagtgattctctttcctcagcctttctaggagctaggattacaggtgtgtgccaccatccctggctaatttttgtatttttagtagagactgagtttctccatgttggccaggctggtctccaactcctgatctaaagtgatccacatacctcccaaggtgctgggatgacaggcgtgagccaccatgcccagcctgccataaagttttatgcctactttagtcctggaacccacattgaggtatcatgaagaatgcagaacatctaaacaaaggggacagtgaaagtccagatgctacatcatgaagcttttcatttcaaaatcaatacagcttccattttagtcaagcaaggatgcaactcccaagagaaacaagagaaaatgcaaagatccacaagggaacatccccaggaaggaagttatcctcacccagggagaccaggttcctataattctccagcatcacgtctctgtatagagtcctctgagcagggtccaggcatttccactcctcctgagagaattctatggccacatccctgaatgtcaatagaccctgaaatgaaaacacattttaaccaaatggttatgagaggagatcttatctttacagaaaatgagaagaagagaggggaaagcatggatttaattgtagtgaatgttctgacaaatccgagtaagggattcttcaccacatgatgtattttttttcttctttttctgtttgagatggagtgtcgccctgtcgcccaggctggagtgcagtggcatgatctcggctcactgcaagctctacctcacaggttcatgccattctcctccctcagcctcccaagtagatagtactacaggcatctgccaccatgcctggctaatttttttgtatttttagtagagatggggtttcaccatgttggccaggatggtctcgatctcctgacctcgtgatctgcccacctcggcctcccaaagttctgggattacaggcatgagccaccatacccggcctcacatgacgtctttattatactttttgaagaggtcaagacaccctgtcagtatgaatttcttatgtttgtaaaaaatataagaaataaataaaaaatcagtgcagggttcctgctatagaaatgtttgaaacttttatggacacaccaagtgacattcagtatctcgaagagacagagcatgagtgatgtcttcacagatgacaacgtccacagtaaaagatcagccaggtgcagtgacacatgcctgtagtcccagctatgtgggaggctgaggcaggagaatggcttgatcccaggaggcagaggttgcagtgatcccagatcacgtcactgcactccagcctgggcaacggaaactaggtctcaaaattaaaaataaaaaatcagccgggcatggtggcaggcacctgtggttccaattactttgaaggctgaggtgggaggatggcttgaccctgagggtagaggttgcagtgagctacgatcatgccagggtgctccagcctgggcaacaaagtgagaccccgtctcaaaataaaataaaatacatgaaaacaaacttactcaaagtacaaaatccattttttaaatgttcacaaaataataaaacctacacagactcacaaaaaactagatgttaatacaaagggttgtcatttgtcccagattttcaaaatataaaagattttcaaaatatatatgtgtgtgtacatatatatgtgtatgtacatgtgtgtgtgtacctatatatgtgtgtgtatatgtgtggggatgtgtgtatatatattatatacatacatacacatatatatgtattatatacatacatatacatatacatatatatatatatatatatatatataggttttaaatatataaaaagtagcaagttttgtttaagtgaagaggaatctcaccttggcggaaaaggacacattgacaactgggggctggggggaatcttgtcagatctaagaaaacaggaaatgccccatcctagaggaagcaatcaccctttcaactgcctggcctggaggatgaagaatcacttgaacccgggaggcaaagtttgcagtaagccaagatcatgccactgcactccagcctgggtgacagagcaagactccgtttcagaaacaaacaacagaaataataataataggtggaatgagaatatagctttatcctctagaataaaaaaaaagtactgctcccatatttgagaaaaattgtaatcatttttaccaaaagcctgtttcacgagcctctccatagtaacaccactgtctccatgagcgtaatatgctaagaatggttgaatgaatctcctgctattatttatgttgattccatattcttaacataatgatggaatcattcatgtatcattcatttccattatatttatttatttatttaagacagagttttgctcttgttacctgggctggagtgcaatggtgcaatctcaggtcactgcaacctccgcctcccgatttcaagtcattcttctgcctcagtctcctgagtagcagggattgcaggcacacaccaccatgcccagctaattttgtatttttgctagagacagggtttctccatgttggtcagactcactcaattacctaaaaatgtagtttaatatcaggcagaaaacatttcctcttatcggtcttttctagaatttaccatgttctttgtgcacattaatatgtgacttccattggcagctactctaatcttggtccacagaaaactgacagtgcatccagatgcggccctgaacaatccctgccgcccaacaccactgacaccataggaccctcaccccgtctccatccatgtctgtgtgtgagcccttcccaggaccatgcctactgcaacctcttctcatgttcatgtcattgggtcacgagagatggaatctaggtgagatgagagggactgagggaaggcatgggtgagtgtgagcaaacctgtcacgcaggatgcttcagactcagagaagtttcccaactccaaggcccagcatttctgaaaggaaggagacagaacaatccacagagaatatcatctcacctgaggaagagccatccctgactcctttgctttcctcttcctcttctgagtttcttcttcacatacccagagtctttagaagtcaatcatgaatgttagaaatatgttgtttattgctcagagtcaacataccccctccctgtaaaacaacgacacatacaaaggagacctcaccctgggaaatatggtccactctgctgcccaccataccagggacaataaactcctataggaaaactcccactccccttctggagaagcccacacacacgctgcagcagtagggatctgggctggaatgagctccccttcaaggcacagacccagacctgaccaaaccacttgcagaggctgggtgcggtggctcatgcctatcatcccagcactctcggagaccaaggtaggtacattgcttgagctcagaagtttgagaccagcctgggcaacatggtgaaactccttctctatcaaaaatacaaatacttagccaggtatggtggtgcacatctgtgtttctgtcaccccagctacttaggaagctgaggtggaaggatcacttgaggtcaggagtttgagaccagcctggcaaacatggtgaaaccctgtctgtaccaaaaatataaaaattgggtcaggtgcaatggctgaagcctgtaatactagcactctggaaggccaaggtgggtggattacttgaggtcagcgttcaagaccatcctggccaacgtggtgaaacctcatctctactaaaaatacaaaaagtagccaggctttgtgggcatctgtaatcccagctacccaggaggctgaggttggaggatcacttgaacctgggatgtgaaggttgcagtgagccaagatcacaccattgcactccagcgtgagtgacagaataagactctaaaataaaataaaatacaaatacaaatacaaaaattagccatgtgtcgtggcacacacctgtaatctcagctacttgggaggttgaggcacaagaatcacttgaacccaggagacagaggttgcagtgagccaagatcatgacagtgcactcacagcctggaggacagagtgagactctgtttgaaaaaaaaaaaaaatctccctctccctccccctccctctccctctccctctccctctccctctccctctccctctccctctccctctccctctccctctccctctccctctccctctccctctccctctccctctccctctccctctccctctccctctccctctccctctccctctccctctccctctccctctccctctccctctccctctccctctccctcctctcgctctccctctccctctccctccacggtctccctctgatgccgagccaaggctggactatactgctgccatctcggctcactgcaacctccctgcctgattctcctgcctcagcctgccgagcgcctgcgattgcgggcgcgcgccgccacgcctgactggttttcatgttttttttggtggagacggggtttcgctgtgttggccgggctggtctccagctcctaaccgccagcctcggcctcccgaggtgccgggattgcagacggagtctcgttcactcagtgctcaatggtgcccaggctggagtgcagtggcgtgatctccgctcgctacaacctccacctcccagccgcctgccttggccccccaaagtgccgagattgcaggctctgcccagccgccaccccatctgggaagtgaggagcgtctctgcctggctgcccagtctggaaagtgaggagcgtctctgcccggccgccatcccatctaggaagcgaggagcgcctcttccccgccgccatcccatctaggaagtgaggagtgtctctgcccggccacccatcgtctgagatgtggggagcacctctgccccgccgccctgtctgggatgtgaggagcgcctctgctgggccgcaaccctgtctgggaggtgaggagcgtctctgcccggccgccccgtctgagaagtgaggaaaccctctgcctggcaaccgccccgtctgagaagtgaggagcccctccgtccggcagccaccccgtctgggaagtgaggagcccctctgcccggccagccgccccgtccgggaggtgaggggcgcctctgcccggccgcccctactgggaagtgaggacccctctgcccggccagccgccccgtccgggagggaggttggggggtcagccccccgcccggccagccgccctatccaggaggtgaggggcgcctctgcccggccgcccctactgggaagtgaggagcccctctgcccggccacgaccccgtctgggacgtgtgcccagcggctcattggggatgggccatgatgacaatggaggttttgtggaatagaaaggcgggaaaggtggggaaaaaattgagaggccgggtggttgccgggtctgtgtggatggaagtagacatgggagacttttcattttgttctgtactaagaaaaattcttctgccttgggatcctgttgatctgtgaccttatccccaaccctgtgctctctgaaacatgtgctgtgtccactcagggttaaatggattaagggcggtgcaagatgtgctttgttaaacagatgcttgaaggcaaaaaaaaaaaaaaaaaaaaaaaaaaagaaaaaaaaagaaaaggaaaaaaaaaaaaaaaaggaattatttgtcacttactgtctctctaagggcagccattgtaagacctcaaagaaactttagcctccacaatcttttctcttaacctgaacatttcctttctatggatcccaggtttttagacaaactcaaccaattgtcaaccagaaaatgtttaaatttacctatagcctggaggcctgcccaccacccctttgagttgtctcgcccttctggaccaaacaatgtctttctttaatgtatttgattgatgtctcctgtctccctaaaatgtataaaaccaagctgcgccccgaccaccttgggcatgtgttcctgggaccccctgaggctgtgtcacaggtcagggtcactcatgtttggctcagaataaatctcttcaaatattaaaaaaaaaaaaaaaaaaaaaaaaaaaaaatcttcatttctgatgtggttgatgcagagataataaacctgagtaacgtgatagagactgatgggcagagggaacttcagatggcagtgggaggacatgggagatatctctgagcctagatctgaaggaggagaaagggacagggctgtcaccatttagggacataggataagagcaggacaatgacctgagacaggaagtattttgatatctgggaaaagagaaaagcaaatgtgactggggcagagggattcatgagatgggggcaagctcccaggaggaggctggacactggcaggggccctggacacagggctgtggagccacagtgaggagatgggcttttgtcctggggaacacaggaagccagtggagggttccctgccagggaatgacatgacttactttagatttagctgtgatgtcctcacagtgaaaacattttcaccgagttaccctgagaaggtctgagatgagtaagaagatgtgcctgaattcttacatgggggcctggaagggctaatgggaagggttggtctttatcaccccatccttgaaaattagagaagcatctttcacatacctgggctaaagaaacttcttttgcaaggttctgatgccattaattcctaacatttaatttttccttacaagaaaattacagtaacatttacaaaatgcaaaagtgtaaacacacagctattgaccttgaaaatagggaggccgaggtaggtggatcacctgagttcagcaattgtagaccagcctgacctacatggaggaaccccgtttctactgaaaatacaaaaattatccaggcatggtggcgaatggctgtaatcccagctactcagcaaggctgaggcaggagaatcacttgaaccagggaggtggcgattgcagtgagccaagatcgtgccattgcacttcagcctgggcaacaagagcaaaactgcatctcataaaagaaaagaaagaaagaaagaaagaaaagaaaacagggaaagagagtcagctgttgaactaagacagaagtaacttttttcattcaagaatacataggtggccaggtgtgatggctcacacctgtattcccagcactttgggaggtcgaggcaggtggatcacctgaagtcaggagtttgagaccagcctggccaacatggtgaaatcctgtctctactaaaaatacaaaaattagctggactccatccacagcttatttaacctcttgttgctccttttccccaatctttagattgttctcaatgtccatagatttccacctcttctcccatctctcctgagctctccctgttaaattctctcttccccgttatacccccctggccccactctctggcaccccagatttcccaggtgtcctccctgctgtggttctccctctgttctccttgccaccagcaccactctgctctgtctgccctggctccaaatccctcctcctctccctcattctcatgagcctttctgtttgctgcccctctccctaccttgctgtctgtccttcatctctctgtacatccagcttttctctacatttctccagttgcttttctcctcctgctttgttatcttttgttttttcacttttgctgtctcttggcaaatccctgaccatcccctactttgccatctgttatgggtctttctccttcttcttttatctgtctcaggttttctactgctctctgattccctctctctgtctcctgatccctttggcccacacaatcacaggagggtttggagtaagacgcctgcatcccagagaagcgcattttccaggggctggagctgggcaggcaagaacaccccgtgtcacaggacaggccccgggtacctccccaacgcgggctcagggaaagcggtgactgcggaggggagacttggggagcaacagggcccggcatgaggagggaggtgggggggagatgacgccttcggacaagggtggggtccgcaggatcccaccaccgggcagagaacgcggcctccctgggactgtggtgtcagcgctgggctccaggggccgacgagggtgaggctgggaagcgccagagcagggatccacctctcgggtgaggactttaaaaagcgcggggtgggaggagtcaacaaacggttgtgaacgggaaaactacgcgatacaaactgtatacattgccctatagcaaaaagaccgaggacagggcagcctcagggcgactttaaacccaaaaggaagtgacttccggactcctaggggaatgtctccatttgctcttgttgaaggaagaagggcgagaatttccaggtctgtggagaccccacatcccaggtacagaattgccggggacctggaggcacagcctcaatacaacacagagcaaaactcaccgccgcagtgtgacttccagtccacgcgatccgcttcctggtccgggcgaatctacaagcacaggacagaagccaggcctccgtggagccaacgaggtgggcggggcctgggcgaggtaggggcggggcctgggcgaggtaggggcggggcgccaggcggagagacctgccctgtagaaccggcagacgcggggcgggggcggatctgtgcttctctcagccgcgtacctagccgctgtttttcgggttttggtgagggaagagacagaccctctcatattgttttatattgttttatactcagtacctgttttaagaaaaaaaacaacaaggaagtaaaaccgaagacaggcagccctgcgccacgcccaaaaccaggcctgggcctgcctggcctaaacccaatagttaaaaatcaactcataacttagaaaccaatgtttttcatagattccagacattgtatagaagaacattatgaaactccctgccctgttctgtttctctctaccagtgcacgaaacccctgtgtatatatctgggactgtagtccctgttacgtatcccctagattgctcaatcacgacccttttatgtgaaatctttagtgttgtgagcccttaaaagggacagaaattgtgcacccggggagctcggattttaaggcagcttgccgatgctcccagctgaataaagcccttccttctacaactcggtgtctgagaggttttgtctgtggctcgtcctgctacaccggaggcaagagtggccaggaaggctgaggcatgattcaaaagccctggaattgtctggaacagggatgcaaactagaacgtgaaatgcaaagccctgcctaggcagaaagtacgatctcatgctgatggtacacagaacagaatagaaatctctccctttctattctccatttgcttcggagggagagtccaccctgtgctcagcttcagagacttccctagggccaccgcctgggatgccggagggagtgttcaggccagggaggagtgaggtcaccacctgctacttaaacacagcagaaatgtggaagtgggggcgggagcctgaggtccagctactcaggaagcagtggcgggaggatcattgagcccggaggtccaagccagcctgagtgacaaagtaacaccccctgccgcagggatcccttcctcatctcttttttttttaatttttaaaataaaattttcattgtgtgagatagggatccaactttattcttttccatgtggatatccagttagttgtcccagcacaattgtggatgacatctattagtttcttttttttatttacttttttttctttttcttttttttttttgagacagagtatttctctgtcacccaggctggagtgcattggcaagatctcggctcactgcagcctctgccttctgggttgaagcaattcttctgactcagcctgcatagtagctggtattacaggcacgtgccatcatgcccggctaatttttgttcttttggtagagacagggtttcaccatgttggccaggctggtctcaaactcctgacttcaagtgatccgcctgcctcggccttccgaagtgctgggattacaggcgtgagtcaccgtgccgggcccaagaaatactctttacttcactttttaaatgttgagaaaatacaattgaaaactaaaaaatcttccccagatgaaaaatcatcttcactatgataacagagaaggaaataacaaccattttattaataaagagccttagacctgaatgtaatgggaaatagaggcaaacagttgagaggttgaaaacagagagagaaacttcactgttctatacaacccattaagtacatgttttcttttgtcttttttctttcttttttttggagacaagagtctcactctgttgcccaggctagagtgcagtggcaagatctcagcttactgcagcctccacctcctgggttcaagcaattctcctgtctcatcctcctgaatagctggaactacaggcgtctgctaccatgctgggctaatttttgtatttttagtagagacggagtttgacctttttggtcaggctggtctcaaactcctgacctcaggtgatccacctacctcagcctcccaaagtgctgggattacaggcgtgagccaccgcgcccagcctaagtacatgttttcaagataaacactaatcagtcctcagggaagaggacttgacaatacccttggtcacacatagttcatcctggctctacttggtaatggaggtgaccatttgtgtcagctaattagcttcatcctgaggaaggggggaaaacgctaacccatgtctttttgacaagtgtgagttttacaacatggcgacaggtgccatctctagtgaggctcctacaatccgacagaaaccgacatcagcagtaaataataaaatttagaatacatgattaagtatagagtttatgtgaacacaaaacttgaggatagccacctggaaacatcaactccaaatgaagggggtctgtgttcccaagtagagatgttaaggtttcacacacagggaaagacagagaagctttaccagaatcaacacattttccattcaagaccagtggataagttgcagcaacttgactggtgatggattgatacagttcaagaaaggttactttatcactacataagaagggacaatcggccaggtgcggtggctcacgcctgtaatcccagcactttgggaggtgaggcgggcagatcacaaggtcaggagatcgagaccatcctggctaacacagtgaaacccatctctactaaaaatacaaaaaattagccgcgtgtggtcatgggcgtctgtagtaccagctacttgggaggctgaggcaggagaatggggtgaacccaggaggcggagcttgcagtgagctgagattgcacccctgcactccagcctgggtgacagagagagactccgtctcaaaaaaaaaaaaaaagaaaaaagagggacaatgatgtcaagaggtcttgtctctggggctgctcagtcttcctaattatctacaggaaaacttttgtgtttttttcttttctttttttttttgagacagagtttcgctcttgttgcccaggctggagtgctatggcactatctcggctcaccacagcctccgcctcccaggttcaagcaattctcctgcctcagcctcccgagtagctaagattacaggcatgcatcactacgcctggctaattttgtatttttaatagagacggggtttctccatgttgaggctggtctcgaactcctgacctcaggtgatctgcccacctcagcctcccaaagtgctgggattacaggcgtgagccaccgcgcccggccctctttttttatttttttgagacagtctcgctctgtcacccaggttggagtgcagtggtgtgatcttggctcactgcaacctccgcctcctgggttcaagcaattcttctgcctctgcctcctgagtagctgggactacaggtgcacaccaccatgcctggctaatttttggtatttttagtagagacgggggtctcaccgtgttagccaggatggtctccatctcctgacttcgtgatgctcccgccttggcctcccaaaatgctgggattacaggtgtgagcctctttgcctggccaaaacttttcttttttaaattgatattaggaaactgaattatatagcttttttttttttttttttttttttttggtacggagtcttgctctgttgcccaggctggggtgcagtggcatgatcttggcccactgcaacttccacctccccggatcaagcagttctcctgcctcagcctcccaagtagctgggaatacaggcgtgccccaccatgccctgtaatggctttgtatgtttactggagacggggtttcaccacgttggccaggctggtttctaactcctgacctcaagtgatccgcccacctcggcctcccaaaatgctgggattacaggcttgagccactgcgcctggccaggaaaactcaaaaaagttgcgcctgcggctgggcgcggtcattcatgcctgtaatcccagcactttgggaggctgaggtgggtggatcacaaggtcaggagatcaagaccatcctggctaacacagtgaaaccctgtctgtactaaaaatacaaaaaattagccgggagtggtggtgggtgcctggagtcccagctactggggaggctgagacaggaaaatgacgtgaacccaggaggcggagcttgcagtgagctgagatcgcaccactgcacttcagcttgggcgacagagcgagactgtctcaaaaaaaaacaaaaaacaaaaaagaaaaaaccttgtgcctgcatgccactggactcttgttgcatgaccacgttcctctcaaggctcagaattatttaaaggtcggtagcttttaatttgaaacatttgatgtttgaattatttaatttcctactaagatacaggtactatctcccttgtttgccttaaaaggatcgctcccaagtccttcagaaatacatccctgggtcattaaactgaaaaaaggtttagttactttctaaaaaataccacttcaggccggacgcgtggctcaagcctgtaaatccagcgttttggaaggccgaggcgggtggatgacctgaggtcaagggttcaagaccagcctgaccaatatggagaaaccccatctccactataaatacaaaaattaaccaggcgtggtggcatgcacctgtagtcccagctacttgggaggctgaggcaagagaaacgcttgagcccaacagacagagggtgcagtgagccaagattgcaccattgcactccagcctgggcaataagagtgaaactccgtctcaaaaacaaaaaattaataacaataataaataaggccagtgcagaggctcgctcaggtgagactccgtcttaaaaaaaaaaaaaaaagaaagaacactaccacttacacagtagggcattctcaaaaacaagggcaacgccacctcttttaagttttgtctttcaagatgtgatttgcgactgaaaactttttcacattcttcacatttgtaaggcttctctctagtatgaagtctatgatgacgtgcaaggtgtgctttctgattaaaaaccttgccacattcattacacttgcaaggattctctccagtatgaattgccttatgaattacaagggctgaatttcaaccaaaggtcttgttatgctcactacacttgtaaggtttccctccagtatgaagtctacgatagcatgtaaaggatgacgtctgactgaaggtcttgccacactcataacaactgtaaggtttcttaccagtgtgacatctattatggcatacaaggaatcaattctgattaaagaccttgtcacatacctcacatttatattgtttctatcctaaatggattatctgatatttccttaagagttagctataattaaaggatttgccactctcattacattggaaagatttttctctcatgtgtacttcccaatttttgtatgggtaatgaagaatggagggaattattcccatagttattagaaatacgggttttgggactacaagaaattctttgggatgtcaaaattaaggaggcattgatgatagacttctcaacttgattaccaattttccattcaggctgaaatatgtggagttcaggcagatgcgaatgaaagctggatccaagctgatctttaataggcttgtttccagcatgcctttgatcatgtcggtctgtactaccagtcaactctttgatttctgtcatgggtgcttcgtgaccattcctttcctcttcttgccactgaaactcaaagttatgaatatctttctcaatttcctggaagcaaaaatctctaatgtgatgactttcatgtctttgcaatgtccctgtgtggatcacttctgtattgccttgcgctgtggatgagaactccttcatcatgcatttggaagagatatctacaaaatataaacaccaataggtttctaattaagtacagatgataaacaatactgaaatgtgtaaatatgaaccaaaaaaacaattcttattttaaactttccaaacatgagcttcaaagtttaggaacacaaaaggagtaagattctataacaaataaagggtgatagcatgtacttcaagtcatttctatggaagcctatttctaatatcatgacaaaacactgacagggcacaaacatgtgtaagcctaaagtatggagtgtttttccactgtgaccctaaagtgtatgagagtttgcaaaaaacatatcactgtctatgaaagaagaaaaaaatgtattcttcatacttacagcatatttactgtatacaaataaatgctgtaggaccatacaatatactatattggtaaataatccacaacaagctcatgtaaggataatcaaaatcaatggaaattctgtattgtcaaacaatcatagcactgagaagataacaaaagattacaaaacttagccttgtgtcatggccggcacctgtattcccagctactcaggaggctgaggcagaagaattgcttgaacctgggagggagaagttgcagtgagccgagatcgcaccactgcaattaagcctgggcgacaaagtcagactttgtttcaaaaaaaaaagaaaacaataaaagaaaatgttaatacaatatttttctagataaatatcataaaattacctttatccatgcagaacaggcactttgtgactttaaaaaaatttggtagttttatttttttgagacagagtcttgcactccaggctggagtgcaatggcaggatctcggctcactacaacctttgcctccacggttgaagtgattctcctgcctcagcctcctgagtagctgggattacaggcacacgccactatgcacagctaatttttgtatttttagcagagatggggtttcaccatgttggccaggcaagtctcaatctcctgacctcaagtaatccacacgccttggctccccaaagttctgggattacaggtgtgagcctctgtgcctggtggcactttgtgacattaacaagtggaatgtgtcagttatattgcataccagatacttaaaagccatatgtaaaatcagaaaaattaataatatattgtaacccatgataaaaccagcaagaaaataagtacatttatatagcctgcagaattgtaagcaattctctcttaagaaaaagtccacaatgtctacttaaccaccagcacaccatataagacctgaaatacatattaagatcactaccttctagaccaggcatggtggctcacgcctgtaatcccagcactttgggagaccgaggcaggcggatcacaaggtcaagagatcgagaccatcctggccaacatggtgaaatgccgtctctactaaaaatacaaaaattagctgggtgtggtggtgtgtgcctgtaatcccagctactcgggaggctgaggcaggagaatcacttaaacccgggaggtggaggttgcagagagccgagatcgcactactgcactccagcctggtgcagagcaagactccgtctcaaaaaaaaaaaaaagcccactaccctctgatgtaggaggtcaagaaaatacacaacaatgctgggcacggtggctcacacctgtaatcccagcactttgagaggccaagtcgggcagatcacgaggtcaggagatcgagaccatcttggctaacatggtgaaaccctgcctctactaaaaatacaaaacgttagctgggcgtggtggtgggcacctgtaggcccagctactcagaaagatgagacaggagaatggtgtgaacctgggaggttgcagtgagccgagatggcgccactgcactccagcctgggggacagagctagactctatctcaaaaaaaaaaaaaaaaaaaaaaaaagaaagaaagaaagaaaagaaaagaaaagaaaatacatagcattaaaaggaataagaattgactaacggccgggcacggtggctcacacctgtaatcccagcattttgggaggctgaggctggcggattatgaggtcaggagtttgagaccagcctggccaacatggggaaaccccatctctactaaaaacacaaaaaaatcagctgggcatggtggtgggcacctgtaatcccagctacttgggagactgaggcagttcttgtgggtggaggattacccgggtgccgaggcaagagactgaaggcacaaaccatttcagtataataaagaaaatagttagaataagaacaatcacaacacaaattagatacagagatgatcatggacaattatcaatcattattataaacagtataaatctttagcttttaatattactctttgtggcattactaatataacctaggaataactggcgggtatagggtcaggtgctgaagggacatggtgagaagtgacctagaaggcaagaggtgaggcctctgtcacacccgcataagggccgcttgaggggtccttggtcaagcggtaacgccagtgtctgggaaggcacctgttacttagctgaccgcgaaagggagtctcctttccttggaggagtcagggaacactctgctccaccagcttctcgtggaaggctggatattatccaggcctgcccgcagtcatcccgaggcctaaacccctccctgtggtgctgtgcttcaatggtcaagctccttgtccactttcatgctcctcccgtactcctggctcctctttgaagttcatagtagatagcggtagaagaaatagtgaaagtcttaaagtctttgatctttcttataagtgcatagaagaaaatgctgatgtatgctgccttctctctctgcttcggctacctaagagggaagggccccctgtcccgtgatcacgtgactttcttcaccttgtcaatcacttagaagattcaccctgcttaccctgcccccttgtcttgtatgcaataaataccagcgagcccagcctttctgggccactaccggtctcctcaacttgatggtagttgtctcccaagcccagctgttttctctttatctttttgtcttgtgtctttacttactacaatctcttgtctctgcacacggggtgaatacccgctaagccccatagtgctggaccctataagttctatatatatgcattgaagggggcctgaccctccacacctgtgggtatttctcatcaggtgggatgagagactcagaaaagaaagaagacacagagacaaagtatagagaaagaacagtgggcccaggggaccggcacactcaacatgcaaggacctgcatcggcgccagtctatgagtttcctcagtatttattgatcattatttttactattttagcgaggggagtgtagtaggggaacaagtggggagaaggtcagcagggaaacatgtgagcagaggaatctgtatcatgaataagttcaaggaaacatactgtgcctggatgtgcaattaggctagatttttgtttctcttcacccaaacatctcagtgtaggaaagagtaaaagagcagtattactgccagcatatctcgcctccagccatggggcgcttttctcctgtctcagaagagaacgaatgggaatggtcggctttacaccgtgacattccattcccacggatgagcaggagacagaagcctttctcccttttttttttttttttttgagatggagtctcgctctgtcgcccaggctggagtgcagtggcacgatctcaactcactgtaagctctgcctcccaggttcacgccattctcctgcctcagcctcccaagtagctgggactataggcacccgccaccacacttggctaattttttagatttttagtagagacggagtttcaccgtgttagccaggatggtctcggtctccttttcccgtgatctacccgccttggcctcccaaagtgctgggattacaggtgtgagccaccacacccagcctacagaagccttcctcttttctcaactgcaaagaggccttcctctttcactactcctcctcagcacagaccccttatgggtgtcaggctgggggatggtaaggtctttcctttcgcatgaggccatatctcaggctgtctcagtgaggggaaaccttggacaatacccaggctttcttgggcagaggtccctgcggctttccacagtacattgtgccccttgttaatcgagaatggagaatggcgatgacttttagcaggcatactgcctgcaaacatattgttaacaaggcacatcctgcagggcgctgtggctcatgcctgtaatcccggcactttgggaggccgaggcagacagatcacgaggtcacgatatcgagaccatcctggctaacacggtgaaacccgtctctactaaaaatacaaaacaaattagtccggcatggtggcgggcacctgtagtcccggctactcaggaggctgaggcaggagaatggcatgaacccaggaggtggagcttgcagtgagccaagattgtgccactgcaatccagtctgggagacagagcgagactccgtgtcaaaaattaaaaaataaaaaaaaataaaaaaaaaaaaaaacaaggcacatcatgcacagccctaaatccattaaaccttgattcagtacagcacttttctgtgagcacagggttggggctaaagttacagattaacagcatctcaaagcaaaacaatttttcttcatatggaccaaaatggaatttcttgtcttccttttctacatagacacagtaacaatctgatctctctttcttttccccacaatgcattgcccttatatagtttgctatgcataaaatgcaaaacatagaatgtgtactgggaaaatttataaactgagtcagagaaaactttgtagaaaacaaactgcacagcaaaaacaaaaaatatgatgcaggctatctggcctaaatgtttgtattggctaaaagtcattatcagatttcttattctccgataggatgttcctgcagatgaggccttttatagaatttggtcttctgtgttgactgttcatgaataggactaatgcttttatttttattttttctttatttactgatttttgagacggaattttgctcttgttgcccaggctggagtgcaatggcatgatcttggatcaccacgacctcggtctcctcagttcaagcgattctcctgcctcagcctcccgagcaactgggattacaggcatgcgccaccacgtccggctaattttgtagttttagtagaaacgtggtttctccatgttggtcagtctggtctcgaactcccgacctcaggtgatccggctgcctcggcctcccaaagtgctgggattacaggcaagagccacggcgcctggccaggactagtgcttttataaaaaagagacagtaaagtgttcattgcctgttcctctttacaccatgtcaggacacaggaggaagatggctggacgaaaccatgaagaaggatctcaccaggaaccaatctggttgaaatcttgctcttagattttccactttccagattcatgagaaataaatttctgtgtctgaagctttctagtttacactatttctttttttgtctgtttttgagactgagtcacgcttcatcacccagactggggtgtagtggcacgattctcctgcctgaggagattctcccgcctcagcctctggagtagctgggactaaggcacacgccaccacgcctggttaattttttttgttgggggggggagacagagtctcccactgtcacccaggttggagggcagtggcacgatcatggctcactgcagcatagcctcccgggttcaagtgattctcctgtctcagcctcccaaatagctgggattacaggtgcaccaagctcagctaatttctgtatttttagttgagacagggtttcaccatgttggccaggctggtcttgaacttctgacctgaggtgatctgtctttctcagcctcccaaaatgctgggattacaagggtgagccattgcgctcagccaattttattttcatttagtagatttgaggtttcattatgtttgtgcaactggtctcaaaatcctgacctcaagcgatctacccacctcggcctttcaaagtgctggaattagaggtgtgagtcaccgcggctggctagtgtaagctatttctgacagaacagtgaaatgagcgagacaggaaaagaggcatctcatcaccaacatcaccgaaggctgacaaatcttattaaacaaaaaaagtttacagtctgtaccataaaacttccaatatgtgaagcaatctaaaagcattaacttttaaaaaccaggcgggtgaatcacttgaggttgggagttcgagactagcctgaccaatatgtagaaagttcatctctactaaagatacaaaaattagccaggcactgccgggaacggtggctcacgcctgtaatcctagcattttgaaaggccgaggcgggcgaatcacgaggtcaggaattcgagaccagcctgaccaatatggtgaaaccccatctctactaaaaatattaaaaaatagccgagctctgtggtgcaccgtgaggaaaagcaagagagatcagattgttactgcgtctacgtagaaaaaggaagacaaaagaaattccactttgatctgtactaagaaaaattgttctactttaagatgctgttaatctttaacttttgtcccaaccctgtgtcacagaaacatgtgctgtattgactcaaggtgtaatggatctagggctgtgcagggtgtgccttggtgaaaatgtgtttgcaggcagtatgcttggtttaccactgccattcattgccattctccattctctattaaccagagacacaatacactgcggaaggccgcaggaaaccctgcccaagaaagcctgggtattgcacaggtctcccccgactgagacagcttgagatatggcctcatgggaagggaaagacctgactgtcccccagcctgacacctgtaaacggtctgtgctgaggaggattagtgaaagaggaaggcctctgtgccattgagataagggggaagcatctgtctcctgcacgtctctgggaatggaatgactcagtgtaaaaccgaccagacattctattctgagataggagaaaaccgccctatggctggaggcgagacatcatggcggcaatactgctctttactgcactgagatgtttgtgtaaagtcaaacataaatctggcctacatgcacatccaggcacaacacctttccttaaacttatttatgacacagagtcttttgctcacatgttttcctgctgaacttctccccaccatcaccctatagtcctgccacattcccctctccaagatggtaaagatagtgatcaataaatactgagggaactcagaggccaatgccggtgcaggtcctcacttgctgaccgccggtcctctgggctcacttttctccctctgtactttgtctcttttctcagtctctcacctccaccttgtgagaaatatccatgggtgttggagggacaggaccccttcacaaagtggtagaactatgggcgtgagccactgcacccagctacacatttacattatagcatcttgaccttcggctccccagctgccttgtgactcggtgtgtgtgtgtgtgtgtgtgtgtgtgtgcatgctcgcgtgttgtgacaggcaagaaaaagccactagagcatcatcgccactggcctggtaggaggaggttgcccttgggctgcagttcactgtgctgtttgcactcttgatccttggaagaatcttcctgaagtcacggagcctccagctcctctggaacagaactagttgtgtaggagtgtgtccttcatgccctcaggtccctgaccttctccccacccttcctgaagggaatccagaacccctgactctgagctcatcacctgcttgtggcaaagtccctgcccataacggccaaactgggtcctggtgatgtgcagagcacggaagacccaggagctggagtaaggcagtggcacaggtgataaaagtggggatgcctcggcactgcctgaggacacagggtctggcctgtaaggcttttctgaccctagtgaggccttctcttcttattttgactgaaataaatagccacaggaagttcagatcaattagagttgaaatttcaagaagaaatgtgggaccatcctcacacttgccccaggccctgagtcttccctgaggatgcctcagcatctgaactataaccccagagtaggtgctgcagttgtcctgtggccaagatgagaactgtgcatccttcagtgaagggagacacaaaattttcaaaataacccatgcagaaaggtgtttctgggtgggcacggtggctcccgcctataatcccagcacactgctaggccgaggcagacagatcacctgaggtcacgagttcaagaccagcctggccaacatggtgagaccctatctctactaaaaatacaaaaataggagcaggtgagttggctcatgcctgtaatcctagcactctgggaggccgagacaggtggattacttggggttaggagttcgagaccagcctggccaacatggtgaaaccccatctctactaaaaatacaaaaagtagctgggcttggtgggtgtctgtaatcccagctactcgggaggctgaggcaggagaatcgctttaacctaggaggtggaggttgcagtgagccaagatcgtgccactgcactccagcctgggtgacagattgagactcaaaagtaaaataaaattaaattagaattaaaatacaaaaattagccaggtgtggtggcacacacctgtaatctcagctacttgtgaggtgagacacaagaatcgcttgaacccaggagacagaggttgcagggagagatgtcatgagactgcactcacagcctggatgatagagtgagactctgtctcaaaaaataaaaaaataaaaagagcatttctgatgtgactgatgcagagataataaaatctgagtaatgtgatagagactgacaggcagagggaacttcagatgggggtgggagggcatgggagacatctctgagcctagacctgaaggaggaaatagggaaagggccatgataatttagggacatagggtaagagcagggacaatgaccagagacaggcaggattttaatttttgggaaaacagataagcaaatgtgactggggcagagggagtcatgagatgagggcaagctcccaggaggaggctggacactggcaggggccctggacacagggctatggagccacagtgaggagttgggctttcaacatttgtccacatggaccagagggccttgagggaaacatgcacttaatagctcacagctcaagattttaacaatgacataaggaaagaaaactgaaaaacagactaactggttaaaccacattttgatgtcaaaggttgccaataaataataaagagtagaaagcatgcagacctcgatctgaaccggacgcaactaatttcaaacagaaactactttgaaattgttttgtaaaactcgaacaaattcagatgtcaacgggaaaataactagaacatatacttgtacagaaaggaatgatgtgagctgattataggatgccacaaaggcatctttcagaagaagtgattatggattaaaaaaggaatttttaaaattaacatttatctcaaactccaaaaaaaaaaaaagaaagaaaaaaaaaaagaaagaaatgaagaggaaccagaaagaaaaaaaggaaatctattacacaacgagaacaaaagcacttttgatgtcccttttgttttttaattttttgtttttttttttttgagatgaagcctcgctctgccccccaggctgcagtgcagtggtatcatttcggttcactgcaacctctacctcccaagttcatgtgattctcatgcttcagcctcccgagcagctggaactacaggtgcacgccaccacgcccactttactttttagtgtttttactagagacggggtttcaccatgttggccagaatggtcttgaattcctgaccttagatgattggctcccaaagtgctgggattacagtcatgagccaccacgcccaggtttgatgtgccttttttttttttttttccatttttcttttttgagatggagtctcactctcgcccaggatggagtgcagtggcgcaatcttggctcattgcaacctccaccttccaccttcaagtgattctcctgcctcagcctcctaagtagctggaattacaggcacgtgccaacatgcccaggtaatttttgaatttttaggagacaggatttcaccatgttggtcaggctggtctcaaactcctgaccttgtgatctttgtgatccacccgcctcagcctcccaaagtgctgggattacaggcgtgagccactgcaccctgatgtcccttttaaaaagtactatgggatgggcatggtggctcacgcctgtaatcccagcatttgggagactgaggtgagcgatcacctgaggtcgggagttcgagagcagcctgaacaacatggagaaaccccatctctactaaaaacaaatttagctgaacgtggtggctcatgcctgtaatcccagctactagggagactgagacagtagaatcgtttgaactcgggaagtggaaattatggtgagccgagactgtgccattgcactccatcctagacgagagcaagattccacctcaaaaaaaaaaaaaaaaaaaaaaaaaaaaaaaagactctgtaggccaggtgcggtggctcctctctgtaatcccaactgtaatcccagtaatttgggaggtcaaagcagaaggatcctttgagcccagaattttgagaccagcctgggaaacatagtgaaaccccttttctacaaaaaaaaaaaaaaatacaaaagctagccaggcttgatggctcatgcctgtggtcccagctactcgggtggctaaggtaggaggatcgcttaagcctaggaggtcgaggctgcagttagaggagatcatgccactgcactccagcctggccgatacagccagaccctgtctcaaaatattaattaattaattaaatttatactattatatgataacagaaagtgatttttttctcccacttcactgccccacttcctattccatcctgggaaaagggaagagagtgtctaacaagtgaatgaagacacaaccctctggctgaatagggattccaactggaagctaacctctgatgccaagatttatagaatgtacatgtctcatagataggaattttaaaattctcaatctcatctgtataatttaaacaagttttaagttattaaactacatacatagaagtcagcatgtcacaacgaatcatatctaatgaactcacccactcatctgaacccaaagttccccgcccctttttttcttttgagacagggtcttgctctgttgaccaggctggagtgcagtggcatgatctcggctcactgcaggctggacctcctgggctcaagtgatcctcctgcctcagcctccagagtagctgggattacaggtgtgtaccatcacatccagttaattttttttttcttttggcagagatgggggtctcactatgttgcccaggctggcctcgaactcctggactcaagcaatccccttgcctcagtctcttaaagtgctgggattacaggcgtgagccactgcgcccagcccctctgtcttcattactgtgcttccctccctaattctgtacatatctctcattctccccttctctctctagctcttgttttcttttctttttccctgggattctgctcttcattttgtacccctctcctctcctgctgtttatccccttcttccctctattacttctcttccacctcttctgctccatcgtcgcaaattctttaacctcttgttgctccttctccccaatctttcgatcatcctcaatctccatatatttctgcctcttctcccatctctgcgcctcctctgctctccctgttaaattatctcttccctgttaaatccccctttccccaatctctagcaccccagatccccaggtgtcctccctgctgtgcttctccctctgttcttgccaccagcaccactctgctctgtctgccctggctccaaacccctcctcctctccctcactctgatgagcctccctctttgctgccccctccctaccttgctcttcttcatctctctgtacatcaagcttttctctacttttctccagttccttttctcctcctgtttttcttatcctttttttttttttttttttttccacttttgctgtctcttggcaaatccttcacccatcctctacgctaccatctgttatggcctttctcattcttcttttctctgtctcaggttttctactgctctctctctcagtctcccgatccctttggccaacacaatcacaggagggctttgaagtaagatgcctgcatcccggaggagcgcattttccagaggctggtgcagggcaggcaagaacacacggtgtcataggacagccccgggcacctccccaacgcgggctcaggagaaacggtgattacggagggaagacctggggagcataagggcccggcacgaggagggaggtggggggcgacggcgccttaagacaagactgggaggcgcccagggcgggaatccgcctcgcggtaaggactttaaaaagtgcgggttgggaggagtcagaaaaaagttttgagcaggaaaactacgcgatgggaagtgtatacgttaccctatagcagaaagattcgggacgggaccggtctatggtgactttaaacccaaaaggaagcgacccccagactctcacggggacttctcaatttgctctgggtaaagaaagacggaggagaacttccaggtctatgaggaccccacgtcccaggtacagaagcgcctgggacccgggaagcgcagacttaacacaacacagagcaaaactcacccccgcggtgggaccgtcactccacgcgacccgcttccgggtttgtgcgaatctgctctctggggacagaagccaggcctgggcgggacccgcggggaggtaggcggggcctgagcgaggtaggggcggggcgcgaggcggagagaccttgcccttcagaacagacagagggcggggcgggggcggggccggggcgggacctgtgcgtctctcagcctggctcccagagcctcaatttttcgggttttggaggcgagaccggccaggaaggctgaggcatgattcaaaagccctggaattgtctggaaggggatgcaaactagaatgtgaaatgcaaagccctgcctgggcggaacatacgatttcatgctgacggcccacagaacagaatagaaatcctctccctttctattttccattcactcaggagggacagtccaccctgtgctcagcttcagagacttccccagggcctccgcctgggatgcgggaccgagtgctcaggccagggaggagtgaggtcaccacctgctgcttaaacacagcaggaatgcgggcgcgggggcggaagtctgaggtcccagctgctcaggaagcagcggcgggaggatgctgagcctgggggtccaagccagcctgggcgacaaagtaacaccgcctcccgcagcgctcccttccttgtctctctctctttttttttttaacttttttttaaataaaatttttgattttgtgagatggggatccaacattgttatttttcatgtggatatccagttagttgtcccagcacatttgtggaagagatctattactttcatttttatatttacattttttcttttctttccttttttgagacagagtatttctctgttgaacaggctggagtgcagcggcgagatctccgccttactgcaaaattcacctcccggattaaggtagttctcttgcctcagcttcccaactagctgggattacagatgcgcgccaccaagcctggctaattgttttgtatttttagtagagactggggtttcatcacgttggccgggctggattcgaactcctgacctcaagtgatccacccgccttggtctcccaaagtgttgggactacaggagttagccaccgcgtctggccaggaaaactcttagaagttgcgtctgcagccgggcgccggtggctcacgcctgtaatcccagcactttaggaggctgaggcgggcggatcacgaggtcaggagtttgatgccagcctggccaatacggtgaaatcctgtctctactaaaaaatacaaaaattagccaggcgtggtggtgcgtgaatgtagtcccagctacttgggaggctgaggcaggagaatcgcttgaacccaggaggcggaggttgcagtaagctgagatcatgccactgcactccagcctgggttacatagtgagactacgtctcaaaaagaaaaaagaaaaaagaagttgcgtctgcataccacaggacacaggttgcatgaccacattcctttcaaggctcagaattatttaaaggtccatacctttaaattgtttaaattggaattatttgatatttcaaacgtttaatttcctactgagttacaggtaccgtctctcttgttgtttgcctttcaaagagagaccccaggtccttcagaaatacatccatgggttattaagctgaaaaaaagtttaggttgtttctaaaaaataccacttcaagccgggagcggtggctcatgcctgtaatcccagtgtcaaaccaccgaggcaggcagaacgcctgagatcaggagttcgagaccagcctgaccaacatggagaaaccccgtctcttgtgaaaatacaggattagccgggcatgctggtgcatgcctgtaatcccggctactctggtggctgaggcaggataatcgtttgaaactgggagacagagattgcggtgagctgagattgcatcattgcactccagcactggcaataagagcaaaactctgtctcaaaaaaaaaaaaaaaaaaaccctcagaagtgaagggggcctgcccctacacacctgtgggtatttctcgcaagatggagatgagagactgagaaaagaaataagacacggagacaaagtatagaggaagaaaagtgggcccagcggaccagtgctcagcatacggaggacccgcgccggcactggtctctgagttccctcagtatttattgatcactatctctaccatctcggagagggggatgtggaaggactatacggtaatggtggggaagggtcagcaggaaaacatgagagcaaaggactctgtcataaataagtttaaggaaaggtgctgtgcctggatgtgcacgtaggccagatttatatttgagtttacacaaacatgtcagtgcagtaaagagcagtattgccaccatgatgtctagcctccagccataagatggttttctcctatctcagtaaatataatgtacgatcgggttttactctgagacattccattcccagggacgagcaggagacagacgctttccttttatttcaactgcaaagaggcctttatctctcactaatcctcctcagcacacacggtttacaggtgtcgggctaggggatataaggtctttcctttcccacaaggccatatctcaggctgtctcagtggggggaaacctggacaatacccaggctttctcaggcaaaggtccctgcggccttccacagtgcattgtgtccctgggtaaccgagaatggagaatggcgatgacttttaccaagcatactgccagcaaacacatttttaacaaagcacatcctgcccagccctaaatccattaaaccttgagtcaacacagcacatgtttctggagcacagggttggggctagggttacagattaacagcatctcaaagcagaagaatttttcgtagtacagatcaaaatggtgtttcttatgtcttcctttttctacatagacatagtaagtctgatctctcttttccccacacagaagacagagaaaatgcatttacaaattttctaaataaatgtcccaagaaaagaggcaaaaaaaaatcttttttttttcaaaggaggaattatacctctatttccttgtttgtttgagacagggtctagctctgtcacccaggctggagcgtggtggagagattagaactcactgcagccgtgaaatccctggctcaagtgatcctttcacctcagcgccccgagcagctgggaccacaggcgcacaccaccacacctgactcgttttttgatttttagtacagacaatgtctcactacgttgccccggctgatctcgaactcctgggctcaagcaatcttcctgcctcagcctctcaaagtgctgggattacaggtgtgagccaccgctccgggccctgactttatttccatgaaatatgaaacccctatcctccacctcctgtgtgtaataggcagttttgcttgtcacttttcagtttccattatccactcaaacaacccaggaccttgcttagtttaataagccgttctgtcagttcccgctgcaaccagcgccccactccacccctttaccgaggtccctgcccctctcccccgccctgccccagactgaggggagctcgccccgcctgcaggacgcacgactctacctgctccaaaaaggcgctttgcattaaaaccattttcaatttaagaagagaaactattcagcgttcagcacacgtggtctactacaataagttgttttaccttcgattgtttgaaatgttaacttaaaacgggcaggaagcatccatgtgatattaggggtaacatcacggcacaagagaatgaatccaccaatcagaactcggaggatccagtcctagagggagaggatgacagcaggagacatccacggcccagctgagaaagcccgaacccgccccctccaggcctggccctttagaacaacccaccttccagagcccgccccctagacggcgtcaaccctctggcctggctcctgcccgcagtccggcccggcccccaggcagccttctcccttttgccccgccccaggccccgcccccacagcggcctccactctctcgccccgacccagcacctgttcaggccccgcccgctcagcaaccttttctctcctgccctgtccccgcttagtgtccagaaccctcccagacagggtccaggaccagcccatggttgttctgcacggagagcccggggctgacgcaggtgagtgattttttgtctttctgcttcaaacctgcctttctcagcaccccagcccccagtccagccataccaggaatttgggtgcgtcgggatgttgaaatccccacgcgagtttgtgcagttgtcagggagtcccagcttcgccatgggaagctcgcagacccggtggctctgcagcgtttgtatcgttttagcccatgtcctccccctttcaggtggcaaaatctcggctcaccacaatctctgactactaggttcaagcgattctcctgcctcaggctcctgagtaactggaattacaggcgcccgccactacacccagctaattttgtatttttagtagagactaaaaatgttggttacaccatgttggttatgctggtctggaaaacccaatctcaggtgatctgcccacctcggcctcccaacatgctgggattacaggcgtgagccactgcgcccagcctctaggtagctttttttagtctttgtagctatgttgtttaggaataaaatgggaggcaggtttttctgtcccaattcccagcttgacctttctctttggcttggtaatttttattatcctttcacaagctcagacagacataatgctttgacacaatgatattgctttatatagattttccacatcaataaagtccaagggtctgtcatgaactgggttagaagagacgagaagattcccaggagactcagtctcaagcaatcctcccacctcagcctcccaaggtgcgtggaccacaggtgtgatccactgaacacagtggagtctccagctcaaaaaaacaaaacaaaggttaaggtactctatcgaattacgtcatttgacttattttatttttattttttatttatttattttttttctgagatggagtcttgctctgtcaacccaggctggagtgcagtggcgcgatctcagctcactgcaacttccgcctgccgggttcatgccattctcctgcctcagcctcccgagtagctgggactacaggcgcccgccaccacgcccggctaattttttgtatttttagtagagacggggtttcaccatgttagccaggatggtctcgatctcctgaccttgtgatccacctgccttggactcccaaagtgctaggattacaggcgtgagccaccacgcccaattgacgttttttttttttaaataaaatgtttcacatatttattaccgaacctagccaaccaatgtgttcgtaacagagtcagagataaaaaatatattcccaataaaacatgtccaactctccagataggggtgacattttcagcttgatatggttgcgtgattgtgaccttattatcagttttcatgcgaatccactggggaatggaacaattctgcttttgtttcttggccaggactctcttaatcctgaaagtcttgtgagaagacatggcaagaagccaagtcaagcacacactacgatgacggagagaggagaagggtcttgattttttcttttttttagactaagtttctttctttttgcccaggctgcagtgcaatggtgcgatcttggctcgctgcaacctccgcctcccgggttcaagtgattctcttgcctcagcctggcgagtagctaggtttggccaaaatatgaactagaaaggcaggaacctggccaaaggtggggagcttgaatgttattaccttattcctgcttgacctttactgccaacgccaacacaaatggtcagaggtcccttatatgaaaatcttcatgatcttgtgggaaaaccctgatttttgtaaaggctgcaaaacaggctcaaaaataaataaataaataaaattacatttaaaagagccagttgcagtggctcacgcctgtaatcccaccactttgggaggccgaggtgggtggatcagctgaggttaggatttcaagaccagactgaccaacatggagaaacaccctctctactaaaaatacaaaaattagccaggcttggtggcgggcacctgtaatcccagctacttaggaggctgaggcagaagaattgcttgagcccaggaggcaaaggttgcaatgagcccagaccataccactgcactccagcctgggtgacaagagcaagactccatctcaaaacaaaaaaataaaataaaataaaaaataaataaaaatacaaaaattagcatggtgtggtggcatgcatcactaatcccagctactcaggaggctgaggcaggagaattgcttgaatgcaggaggtgaaggttccagtgagctgagatcatgtcattgcactatagcctgagtgacaagagcaagactccatctcaaaaaataaaaataaaaaacaggctgggtaaagtggctcaagtctgttggccaggctggtctcaaactgctgacctcaagtgatctacctgccttggcctcccaaagtactgggaaaacaggcatgagccactgcacctgacccattcttcttaacattaacactttttatgtcaattaatgcgtgaactcaatgttaagtcaactcaaactcaagtcaatgttgaatcaactctaatgtcaattaaagttttatgattttttatattcattttatttggaacaattatctcaaaaatgaattttctgatgttctgcatggaatgaccacagagtgaagaccttgccacccttacatttgtaaggcatctgtccagtatgaattctctgatgtctaatgaggtgtgaacatgaagtaaaggctttgccacaatcatcacacttgtgaggtttctctcctgtatgaattctatgttttgcataggatgaagcttgactgaagaccttgtcacagtcatgatatttgtaaggtttctctccagtatgagttcactgatgaactacaagttatgaatgacgtctgaaaaatttgccacatttattacacttgtagatctctcttcaatatggattctgtaatgatttgcaatggttgtagcattactgaagactttgtgacaatcattacatttgtaaagtttccctacacccatggattgcttgatggtgaataagtgttgactgtccagtaaaggctttgccacactcattacacttgtaaggtttctctgcagtatgaactctctgatgttttgcaaggcttgctttttgattaaaaaccttgccacattcattacacttgtaaggtttctctccagtatgaactctctgatgttgtgcaaggattcctttttgattaaaaaccttcgcacatttattacacttgtaaggtttctctccagtatgaactctcgtatggtttgcaaggcatgaatcactccggaaagccttgtcacaaaccttacatttgtatggtttttccccagtatgaattctcctatgtctttcaaggtgtgatctgcgactgaaaactttgtcacattcttcacatttgtaaggtttctctccagcatgaagtctatgatgacgtgcaaggttttctcttcgactaaaaaccttgccacattcattacatgtgtaaggtttctctccagtgtgaagtgtatgatggtattgaagggatgacttccgactgaaactcctgccacatttattacacttgtatggtttctctccagtatgaactctctgatgttctgcaaggtatgaatcactccggaaaaccttgtcacaaaccttacatttgtatgatccctctccagtatgaatcttcctatgtctttcaaggtgtgatctgcgaatgtaaacattgtcacattcttcacatttgtaaggtttctctccagtgtgaagtatatgatggcattgaagggatgatttctgactgaaggtcttgccacactcattacacttgtaaggtttctctccagtatgaattgccttatgaattacaagggctgaatttcgaccaaaagtcttgccacactcattacacttgtaaggtttctctccagtatgaagtctacgatggcatctaagggatgacttctcactgaaggtcttgccacactcattacacttgtaaggtttctctccagtatgaagtctacgatggcatacaagggatgacatctgagtgaaggtcttcccacactcattacacttgtaagttttctcaccagtgtgacatctatgatgatatacaatgtattgcttctgattaaagatcttgccacatacatcacatttatattctctctctcttgaatgggttatgtggtgtctccttaagagtgagctataattaaaggctttgccacactcattactttggcaaggtttttctctcatgcatatttcctgtatttgtgtgaatgaagaatggaggaaattcttcccatacttattagaaatatgagttttgagcctacaagaaattctttgggattctgaagctgaggaagcaccgatagacttgtccaattggttactaattttccctttagtctgaaacatgtggagttcaggcagatgcgaatgaaagcttaatccaagctgatctttaataggcttgtttccagcatgcctgtgatcacttcggtctgtactaccagtcaactttttgatttttgtcatgggtgcttcatggccatttctttcaacttcttgccactgaaactcaaagtgatgaatatctttcttcatttctgggaagcaaaaatctccaatgtgatgacttttatgtctttgcaacgtccctgtgtggatcacttctcctgtaatactgtgcctggttgatgagaactccatcatggattttaaagagctatctaaaaaatataaagaccaataggtttccaattaagtacagatggtaaataatagttgatattcagatgtgtaaaaattacacaaaaagcaatacttattttaaacttcccaaatgtgatcttcatagtttaagaacacactgtctctactgaacatacaaaaattagccagtcatggtggtgggtgcctgtaatcccagctactcaggaggctgaggcagcagaattgcttgaagccaggaggcagaggttgcagcatgcggagatcaccacattgcactccagcctgggcaacaagagcaaaattctgtgtagaaaaaaaaaagagttcagtcaagagcctcatatatatgaggcagtgagcctgaatgatgtcctccctaagaggaatttctacagcagtgactactgcttagagaagatgaccattcgtttatgtgatgaacactgtcacagtgctagtgagagatgcttctgtgatggttctcaaaaaccagaatgaaaggccaagcatggtggctcacgcctgtaatcccaacacttcgaggctgaggtgggcaaattgcttgaggccaggagttcaagaccaacttggccaacatggtgataccctatgtctaataaaaatatgaaaatctgccaggtatggaggcatgtgcctgtaattccagttaggttgagaggctgaagtacaagaattgcttgaactcaggatgcagaggttgcaataagatgagatcaagactctgcactccagtctgttcaacagagggagactctgtctgaaaacaaacaaacaaaaagaaaacaaaaccacaagcacagctggaaacacttgtcaatcagtgtcatgctttctatctcgtatcctgggccatgctgaccattctgctcagggcttccagggacatctcttcctagagcaggatgatgttcaattgtattagtcaaagtgttcgtgaattttctgtttttatgtaaaaccactccaaagaagagtctctaagaagctgtccatgacagataggagggtcatcaccgcagaaaacaatgacatgtacatcaaaagcatgtatggggcaaaatcacaaaagagaatataaaaccagaaagagccaagatagacaagtgcagattcctcatgtctggagggacattttcctcacccacaaactccaggttcctgtagttctccaacatcacagccctgtataaagccctctgtgcagggttcaggcatttccactcctccaaagagaactctatagccacatccctgaaagtcaagcgtccctaaaataaaaaacacgtttcaacaaaacattatggaggagtgagttattgccctcacgtgaaatgagaaaacagaaaataagtattgatttgatccaagactgtgttctgacaaatttatgttaaggtatttttgaacaatttttcagtatagttgcattttattgtactttttcatgatagcttttaaaatcccctaagtcactgtggaagtctcagttttatggacaatataaggccaggaatggtggctcatgcctaaaatcccagcactttgtgagaccaaggcaggtggatctcctgagctcaggagttcgagcccaggacaatatggtgtaaccccgtctctactaaaaatacaaaaaaaaaaccaggtgtggtggcacacgcctctagtcccagctacctgggaggctgatgcacgagaataacttgagaacaagagacgaatgttgcagtgagccaagatcgtgccattgcactccagcttgggctgcagagtaggactccatctcaaaaaaaaaaagaaaaaaaatatatatatacacacatacacatatgttttatatatataatatatacttatatatattatatataaatatataatatatattttaatatttaattatatataatatatatttataatatataatatataatacaatattatatataatatgtatttataaaatataatatataatacaatattatatataatatgtatttataaaatatatatgatacaatattatatataatatatattacaatattgtatcatatattatatataatattgtataataaatatattattaaataaagatattaaatatatataatatatattttatatatatatataaaataagtccagacatggtggctcacacctgtaatcccatcactttgggagaccaaggtgggtggatcacttaaggtcaggagttagagaccaacctctccaacatggcaaaactccgtatctactaaaaataaaaaaattggctgagcatggtagggaggtgcctgtaatcccaactattcaggaagctgaaacaggaaaatcgcctgaactctggaagcaggggttgcagtaagccaaggtcacaccattgcaatcctgcctgagcaacagactgagactctttctcaaaaaaaaaaaaaaaaaggtatatatatattgcaaataatgtattttctacataaaccgtgggattggctgcacacagtaggtacacctgtaatcccagcactttgggaggctcaggcaggtggataacctaaagtcaggagtttgacaccagcctgaagaacatggacaaattctgtctctactaaaaatacaaagttagctgggaatggtggcgcatgcctatattcccagctactgaacctgggaggtggaagttgcagtgagccgatatcgtgccactgcactccagcctgggccacaagaatgaaactccgtctcaaaaaaaacaaacaaacaacaacaacaaaaaagaaatgaaacaaaactgtcaaggactcatgagtcttcattcagagaaagctccaaggaggatttaaaagagtgagctatcttgttttctaccttggaaacatgaaaattttcagaacttgcaggataaaatatcataacaaacattcatcagaccgggagcagggctcacacctgaaatcccagcacttagggaggccgacgtggaaggatcacttgaggccaaaagttcgagaccagcctggccaacatggtgaaaccccatctgtactaataacacaacaattagccaggagtgtagcacgcatctgtaaatgcagctactcagttggctgaagcgtaagactcatttgaacctgagagccagaggttgcaatgtgccactacactccaggcggggaggccctgtctcaaaaaacatgcaaaaaaaaaaaaaaaaaaccccattcatcaaataattttttctaaaatctcataacggtatatgaatacatttctaaaggattgcgccgacttgccacagaactctcaacagcgattccccactgagacatgggaatgggtggaaggctggacaggaaaggggatgcataagtgcacttttctttggacttttactacacaacacatatatacatcatgtgatgtttaaaataaaagaattacttaataataatgggtagaaaaagaatggctccatcctctctaacgacgtaagttgtgctcttatgtcagagcaaacttataatcatttttacctaaaatgtttgcttcatcagagtccctgtaaaaaaaacaaaacaaaacaaaaaacaaaaaaaaagtctctgtggggtcaaagtgctgagaatgatttaaagaatcccctgcagttagatatttatattgatttcataatttgaagtcaatgatggaataaagctaactctattactggtatctatatccgctttccattctattctaagacattgaaagtgcagagtcctgctgggctgtctcacacctgtaatcccagcaatttgggaagctcaggtgggagggccacttaagcccaggagttcgaggctgctgtaaactagaattgtgccattgcactccagactgggccccagagtgacaccgtgtctcttaaaacaaaagtttggcgtcagagacatattgactcactagtgtagcttcaaatgcattacaaaatcagacacaaaatatctcccctagtttgtctcctcttccagaatttaccagattaaccagtgaacattaatgtatgactttcatatacagtttctctgatctggtccacaaagagctaaacatgcatccagatgtggcccctgaacaatccctgctgcccaacatcactgacaccatggggcccacaccccatctccatccatgtctggtgtgagcccttcccaggaccatgcccagtggagcctcttcccaagctcatgtcactaggttataggagatggaatttaagtgaagatgagagggactgagaaaagacacgggtgagtgcgagcaaacgtgtgatgtagaatgcttcacactcagagaagattggctactacaatacctggcacttcagaaaggaaagagacagaagaatccaccaaggaatatcacttacctgaggaagagccatccctggctccttttctttgctcttcttggtggcttcctcacgtaacatgagtctttggaaatcctgtatgttaaaaaagcaagagatttaatatttagaaaccattgactcctttcctgtgacaaaacacacacacaggggaaacctcacccgagagaaagatggtcctttgctacccactgcaccagagaccatgcagagataagaaagttccacaggaagacctacaaatgtaattttgacccgttttcagatcttgctcccctcctggaaaagtccacacacacgctgcagcaggacacagatcttcagggcacagatctagccctaaccaaactccatgcagagcacagccccctcacctccctgtggatcacagactgatctcagctctcaacatggaggaaacttccttgatgtttaatgctggacacagataagaatcaccagtgccattgtaagtattattgagtgtgggtcccatcctattataatagcaatctgataaaacagcatgcctgtaatcccagcattttgggaggccgatgcagctggatcccttcagctctggggttggacaccagcctgagcaacatggcgaaagcccatctctacgaagaacacaaaaattagtgtggtgtggtggcacgcagctgtggtcccagctactctggaggctgaggtaggaagcagaccaccacttctcctgctgccttcctccctcccccttgcctagtttataagacaggaggaaaggaagaaagcaaaaagttagaaagaaacagaagtaagataaatagccagacgaccttggtgctaccacctggccccggtggttaaaaataataataataccaacccctgacctaaactacttatgttatctgtaaattctagacattgtatgaagaagcattgcaaaagtttctgttctgttagctgatgcacgtagtgtcaagtcacattccccacacttgcttgatctatcatgaccctttcacgtggatgccttagagctgtaagcccttaaaagggccaggaatttctttttcagggagctcagttcttgagacacgagtcctctgatgcgctgggccgaataaagccacttccttctttaatccgttgtctgagaggtactgtctgcggctcgtcatgctacatttcttggttccctgacttggaagcgaggtaattaacagaaggtcgaggcaaccccttaggtgacttaggcctgccctttggagcatccctgctgggtactccagccagcttgggcgacatggattctgagagtgctaccaggtaggcatgtgccccagaaagatacttagcctggccatccgaacttgcagtgtaaccagtgtgcttactgtaaagaaataggatattagaaggacaagtgccctcagctaaaaggaaaacaaggtggctcagagcaggaggccccagaaggagccctgttcaatatagcagaagagttactgaactgaggaggaccaggctcaactgcccccaaggagcccatggtcaagatgacagttaggggcaaagacattgattttcgtattgataccagtgctgaacattcagtagtaaccgccccggttgcccccctttccaaaaagactattgttataatcggagccatgggagttttatcaaagcaagctttctgttgccccagacttgtactgtaggaagacataaagtgattcaccagttcttgtacatgcctgacttgaaaggacttgaaaggacttgcttagcgagctgagagccaccgtctcttctacagagcacagctctttacagctaaggttacccagaacgggagtcattatggcccttacagtcccccaggaagaggaatggagacttcttttaactgagccaggccaagagataagaccaactctggctaagcggtggccaagggtgtagacagaagacaaccctccagggatggcagttaaccaagccctggtacttatagaagttaagcgtagggcccagccagtcaggcaaaaacagtacctggtccccagagaagatcttgaaagtatccaggtccatctcaagagcctgagagcctttagaattacagtcccttgtcagtctccctggaacactcccctcctgcctgttcccacgccagggaccaatgactacaggccggtacaggacttgcacttagtcaatcaagctacagtgactttacatccaacagtacctaacccgtacacgttaaggttgctgccagctgaggacagctggttctctggcttagacctgaaagacactttctttagcattagactagcccctcagagccagaagctgtttgcctttcagtaggaagatctgggatcaggtgtcactgctcagtactcttggacccggcttctgcaagggttcaagaactcccccaccatcttcagggaagcactggctcgggacctccagaagtttcccaccagagacctaggctgcgcattgctccagtacgttgatgaccttctgttaggacaccccatggcagttgagtgtgccaagggaaaggatgccctactctggcccttggaggactataggtataagttgtccaagaagaaagcccagatctgctgacagcaggtacattacctaggatttactatccaacagggggagcgcagcctgggatcagaaggaaagcaggctttttgcaacctactgaagcctaagaccagaaagcaggtgaaagaattcttaggtgctgtgaggttctgcagaccgtggatcccaaactttgtagtactggccaagcctctgtacggagtcacaaaggggcaggaccaggaaccttttgaacggagatcccaacaacagcaagcctttcatgagttaaaagaaaatcttatgtcagccccagccctggggttacctgacctgacaaagccttttacgctgtatgtttctgagagagaaaatacggcagttagggttttgatccaaactgtggggccctggccgaggccagtggcctgcctctctaagaaactaaatggggattctaaaggttagccctcatgtttgagggccttggcagcaactgccctgctggcagaagaagcagataaactaactcttaggcaaaacctgaacataaaggccccccatgctgtggtgactttaatgaataccaaaagacatcattggctaatgaatgctagactaaacaagtaccaaagcttgctctgtgaaaatccccacataaccattgaagtttgtaacaccctgaaccccgccaccttactcttggtatcagacagccctgttgagcataactgtgtagaggtgttggactcagtttactttagcaggcttgacctttgagaccagccttgggcatcagtagactgggagctataagtggacaggagcagcttcaacagcccacaaggagagagatgtgcaggatatgcggtagtaaccctggacactgccattgatgccagatcgttgtcccagggcacttcagcccagaaagccgagctcattgctttaattcaggccttagaactcagtgaaggtaagactgaaaatatttacactgactctcggtatgcctttttaacccttcaagtgcataaagcattatataaagaaaagggcctgttgaactctggagaaaaagacataaaatatcagcaagaaatcttgcaattattagaagcagcatagaaaccccacaatgtggcagtcatgcactgcagaggacaccagcgagcttccacctcggttgccttagggaactccagagctgactcagaagctcgaaaagcaacatccacaccctactgggcatcagtcacagcccccttgctccctcaagcacctgaccttgtacctacttattctaaagaagaaaaagactttctccaggcagagggaagacaggtgatggaagaaggaaggatccggtcaccaaataggacagtacctgtgccacagctgctaggagccacagttgtactggaggtgcatgaaaccacccatctaggtcaggagtcacttgaacagttgttaggctggtacttctacagctcacaattgtcagccctcgccaaaaccgtggcacagcggtgtgttacctgccgacagcacaatgcgaggcagggttcagccattctgcccggcatacaagcttatgaagcagccccctttgaagatctccaggtggacttcacagaaatgccaaagtgtagaagtaacaagtatttactagttctcgtgtgtacctactctaggtaggtggaggcttatcccacacgaactgagaaagctcatgtgcttcttcgagatcttattcctagatttggacggcccttacgaatcagctcggataacgggctggagtttgtggctgacttagtacagacgacagcaaaggtattaaagatcacgtggaaactgcatgctgccttctgacctcagagttctggaaaggtggagtgaatgaatcggattatcaaaaatagcttaaggccttaggaaaaattacacaaatgatttcagcccaggtaaatgagagatgccccattagcttattctccccagttcactctttctccccgggtgattgagtgtggatcaaggactggaacgtagcccctgtgtgcccccactggaaagtaccccagaccgtcatcctgaccactcccaccgctgtgaaggtagaaggaatcccggcctggatccaccacagccatataaaacctgcagcgcctgaaacctgggaggcaaggccaagcccagataacccctgcaaagtgaccctgaagaagacgacaagccctgctccagtcacacccggaagctgactggtcctacgcacagtggaagcatgaggaagctcatcgtgggactcattcttcttaaattttagacttgtacagtaaaggcttcaactgaccttcctcaaactaaggactgttcccagtgtattcatcaggtcactgagataggacagcaaattaaaacaatctttctgttctatagttattatgaatgtacaggcacgttaaaaggatcttatttgtataattccactcaatacaaggtacgtagcccaggaaatgacaaacctactatgggttataacccatctaagcctcctgcaaccaccgtttttcaaataagattaagaactggtcctttcctaggtgacacaagtaaaataataactagaacagaagaaaaaagaatccccaaacaagaaactttaaatttgatgcttgtgcagccattaatagtaacaagctcagattaagatgtggctctcttaactaagaaaggagctgcacagtagaaaataaatgtttgtcatgaggcagaggtctgtgaaaatttgcctgttgcccatgtgttatttaggctacttagaaaaatgacaaaaaagacccggttcactttcaaaaaaaagaagccaacccctcctgtgctagcagtcactgtaacccactagaactaataatcactaattccctagacccccgttagagaaaaagagaaggtgtaatcctgacggtcaataggacaagggtaaccccccaagttgccattttagtccgaggggaggtccccaggccctttcccaaaccagtgtttcaagccttttataatgagctaaatctgccagcaccagagcttccaaaaaagacaaggaacttgtttctccagttaacggaaaatgtagctcattccctcaatgttgcttcttgttatgtacgcggaggaactactgttggagaccgatggcctcaggaagcccgagagttggtgcccactgatccagttcctcacacaattccagctcagaaggcccaaactagcaacttctaggtcctaaaaacctcagttattagacaatactatgtagctaaggaaagaaaaaacttcagcaaccccgtaagaaagctcaattgtctaggacagaagttgtatacaacagcacaacaaggacagtcacttggtgaggcttaaaccacactgaaaagaactcattacgtaaattttctaaattacagactgcctaggctcatccagaatttcattgagactggacggcccccgctggactatactagtccaggcacagagactatactatactatactagtccaggcacaggctatactagtctgtaggcacagagacccatctccaacaacaaagaagaaaagtgaaaatctgggtcctggctctgggaatctaaggccaattaatgtgaactttgcaaaactagaccaaaaggaataaccccatctccccacccgtagtaacaaaggatcaaagggtactctccctgtagccctcccacttccaccacgtctcagatggaaagggaaagagcccaggagtggccacaaagcaccggccaccctggggctgcggggctgcaacgctgcgctccaggggccgactagagcgaggctgggaagcgctcttgcccagggcaagaatccagctccgggtgaggacttgaaacagcgcgaggcgggaggacgcgtcagaaagggttttgctaaggaaagtttcgcgacaggaggtgtctgcacggccccactgcagaaagaccggggacgggaccagcctcagggcaactttaaactcaaaaggaagcgactcacggactctcacccggacgtttcaatttgctctgggttgagaaaagaggggccggaacctgcaggtctgtggggaccccacgtcccctatatagcagcaccagacaactaggaaacgcacacgccgccgtgcaactttcagtccacgccatccgcttccgggtctgtgccaatcggcgcaggacagaagcgggacctgggccagatccccgagaggtgggcggggcctgggcgaggccggggcggggtgcaaaggacaaggggcccggcgcggaagagaagagtcttgggctgggaggagtccgcgggggcgggaaaggggcggggcctgagcttttctccatctcgctctccgcgcctctgttttcaaggttttagaggtgaaacccgccagtgaggctggagcagctcagcagtcagggaaatagtacctccctgagaagtcgccgtgtggcggtaattggatccgggaaagttccttgctattgaaatttattttagcaatttaattccaaagcctggaagttgtctacggcaggaatgcaaactagaatgcgaaatgcaaagccttgcctgagcgaaaggtacaatttcatgctgacggtccacagaacagaatagaaatcctctccctttcaattctccattcactggagtgggagagtccacactgtgctcagctcctgagacttccctagggccaccgtctggggtgcggagcagaggagtgtgcttaaacacagcagggatgcgggcggggtggcaggagtctggggtccccgctactcaggaagcaggggcgagaggatcgctgagcctggagttccaggccagcctgggcgacaaagtaagaccctctatcccagagctccctcctccgtctcaataaacaaaaaagtgatttaaaaaaagcactgacattgtaacagtgcatataagttgcccagttgtttcttacgtttattatttcatgctgcacttaaaatgagttatttttgtcgtggaaaagaatcaaactgtaaaatatcttaagagatttattctaagctaaatatgaatgaccctcaggaggtcctgagaacatgtgtccaaggtgatggggaacagcttgttcttagacattttagggaggcattagacatcaatcaaatacatttaagaaatacgctgctttggttcagaaaggaggggcaactcaaagcggggacttctgggctacaggtaaattgaaacattttctgattgacaattggttgagtttgtctaaatacctgggatcaacggagaggaaatgttcacgttaaggtaaaagattgtggagaccaatgttgttttcaagtcttctattggctgcccttagagataatagatgataagtgttttctattcagacctttaaacagtgcgagattcttacttaatctcttcaggattggtagggcctagaagaaaaagatctagctatgttaacagagattctttacaaatgcacatgtacccctcacaaagaacagctttgcaggaccatttcaaaatatggcacagaaacatgttttggggtaaaatattttgactttcttctttgtcacgttattccagagtcagactggaaagtaagacaggatatataggactaaataaaacccatctgatgagtatttatggtttgtagggcatgactccccagaccctttagataggaatttgggcaagagaaaaaaattagaccttggtcctcattctcaaattctttttttaaaaaataattcctaagtgtattgtaatatcaaattcactttacgtgccttctgaaaataagtagaaaatgtactttttatcttcaagttgtaatttttttttccctagaaacaggacctagttctgacacccaggatggaatgcagtggtgggaacactgcccactgcaacctcaacctctggggctcaagcaatcctcccgtctcacctcccaactagctggggccacaggccctcaccaccaggcctggctaattttttaatattttgtagagtcgggggtccactatgatgcttaggctggccttgaactcctgtactcaaacaatcctcccaccttagcttcccaaagtgttgggattaaaggcgagctaccacacccatccaattgtaatctattttgggtgttttctttgttgttctctcctaagtgttctatcaggtgtgaacaacaaaggctgtaaaataggcagtcttcaaacattgggatttattttcatatagagaataattatgagatattactaaggatacattgcagtcaggttattctgttttacgtgggccctgaagaaaatataactaaattacaaaattggctgggtgtgatggctcacacctgtaatcccagcactttggcaggcctaggcgaatggatcaccctgaggtcaggagtttgagatcagcctggccaacacagcgaaaccccatctgtactaaaaatacaaaaattagctgggcatggtggcatgcgcctgtaatctcagctactcaagaggttgaggcaggagaattgcttgagcccaggcagcagaggttgcagtgagctgacatctcaccattgcactccagcctgggcaacagagtgagactgcatctcaaaaaaagaaaaaaaaaattataaacttttacatcaccgcatttctgcatgcaataattttatggcaatatctgtaagttaacatgtactatgaactatatttttcactcacatccctagttatcgaaggtttcatttatcaaatactagtaattagctaaaacataattatgtttaggaagaaattagcatatctaaaatattagcaagtttaaaaaagcataatgtggccagggatggtggctcgtgcatgtaattccagcatgatgggagaccgaagcagaaagatagctagtggccaaaagttggagaccagcccaggcacatggtgaaacctcatctttatattttaaatatttatgtatctatgtattcatttattcatctttgagatggagtttcattctcattgcttaggctggagtgaaatggtgtggtctcggctcactacaacctctgtctcctgggttcacgtgactctcctgcctcagcctcccgagtagcaggtattacaggcatatgccaccatgcctgactaattttctatttttactagagacggggtacctccatgttagtcaggctggtctcgaactcccgacctcaggcgatccacccaccgcagcctcccaaagtgctgggattagaggcctgagccaccatacccagcctctatgtagctttgtaaaaaatccttgtagctgtctcttttaggaataaaatgggaggcaggtttgtctgacacagttcccagcctgacttttctctttggcttagtaatttttaagcttctttcacaaccttctgacagacataatgctttgacacactgatattggtttatatagattttccaaaacagtaaagtccaagggtctatcctgaactgggttagcggaggcgagaagattcccagaagactcctgatctcaagcaatcctcccacctcagcctccgaatgtgtgaggaccacaagtgtgatccactgaacccagtggagtctccatctcaaaaaaaaccaaaaagcaatacgggaattaaggtactctatggaattacatcatttgacttttttttgaaatgaaaagcctcacatatttattactgaacccagccaaccaacatgttcataacagattcagagagaaaaaatatattcccaataaaacatgtccaactctccagataatggtgacattttctgcttgatatggtaacgtgattgtaatgctcagacagcataaaaatgtgtgccatctcatgtacaattccttatagacacggattggttcttctccaatgtctccttttaaagttgtacctgattttattaccagttttcatctgaatccactggggaatggaacaattttgctttttttcttggccaggaattgcttaatcctgatagtcttatgagaagatctggtgagaagcagagtcaagtacacaccatgatggtggagaaaggaagagaaggggcttgacatctttttttttttttttttttttttttttttgagagaaagtttcactcttgttgcccaggctggagtgcaatggcactatcggttcactgcaacttccacctcctgggttcaagcgattctcccacctcagcctcccaaggagctgggattacaggtgtctgcgaccatacctagctaatttttgtatttttaatagagatggcatttcaccatgttaaccagcctgttctcaacctcctgactattgtttctgctgttagctgtcagtcctcttcatcacggcacaaacaagattattgtttttctctgaaactgatgtggatggtctgcctgctgctccacgtgtaaccttcaacattgtcttctcccaactcaaaattagttatccatttacaaactgttgatttcttttgggcatcgtccccataaccttttcataaagcatcaatgatatcataattcatctacccaaactttaccataagtattctttttttgagacatgctggagtgcagtggcaagatcacagctcactgcagcctcgacctcccaggctcatgccatcctcatgctacagactccacagtagctggccctgcagtcaggtgccaccctgcccagtgaatttctgtattttttgtatagaaggggttttcaccatgttgcccaggctggtcctgaatgcctgggctcacgtgacccacctgtcttggcctctgaaattactggaattacagacctgagacactgcaactgttctcatcataaattttatgtttcttcttgtttcaattttagcagaatttgtattcctttgatacagtctcttttcaaactcatgtcttatccttctcagtgcctcaaactagagcctgttcagacatgttataacagatttgtatcagtttattttggtgcaaaaactgtgaaattcatgcacaatttttccataatatgtatttttccatgagcttcttgaagaccacttgtactagaaaactgtattcaagaggatatataaaaggattgtagatatgcaagtgccatttacttctggcatgcaaggatggttcaacatattcaagcaaatcaatgtgatataccacttgaacagaatgaaagatgaaaaccacatcatctcaacagatggagaaaaatcatttcacaaaattcagcatctgatcatcatagaaatcttaaacaaaatagatggagaaggaaatttacctcaccaatagaaagaccattgatgaaatgaccaatgtggagataaccaagcagggaaaatagaatccttttcccgtaggatctcacatgatgcaagaacgttctcactttttctattcaataaatactggaagtcctagccagagcaatgaactagcaaaagaaatgaaatgcctcaaaatcagaaaaagtaaaattatattttttgtagatgacatgatcttctgtgtagaaaatcacaaagagtcaaccaaaatactactgtgactaataaacacatcagtagatttgcacaatacaatatcagcaccaaaaattcgttgaattttcatacattaacaataaacaattttaaatgaaaatttaaaaacacttccatttgctagagaacttaaagtaagaaataggaataaatggaaagaagtgagaaattcatacattgaaatctacaaacattgatcaaaatgattaaaaacatatataaagatataacccatattgatgttttggaaaaattaatactgttaaatgattacataacccaatgtgattttgattcaacacaatacccataaaaatctctatcagtttttgttgaagaaacaaaaaacagactgggaaaggtgctcacctctgttggccaggctgctctcaaactcctgatctcaagtgatctacctgtcttggcctcccaaagtgctgggattacaggtgtgagccaccgcacctggcctaatcctcttaacataaacactttaatctcaacaaatacttgaactcaatgttaagtcaactcaaactgaactcaatgctgatttgaatctaacatcaattgtgcttgatggtttgctatactcattgcatttgaaattattacctcaaaaatgaatttcctgatgtcctgcaaggagtgacctcagactaaagatcttgccacacatatgacttttgtaagatctctgtctagtatggattctctgatgtgtaatgaggcatgaacctgaaataaaggctttgacacaatcatcacccttgtgaggtttctttcttgtatgaattcacctgtgttttgcataagatgaagcttgactgaagaccttgccacaatcatcacatttgtaaggtttctctccagtatgagttcgctgataaactgcaaggtatgaacgaagtctgaaaaatttgccacatttataacacttgtaagttctcacttcattatgcattctccaataatttgcaatggttgtagcattactgaggactttgtgacaatcattacattagtaaagtttccctatgacatggattgcttgatggtgaataagtgttgactgaccactgaaggctctgtcacactcatcacacttgcacggtttctctccagtgtgaattctagtatgttgtgccaggtgtgaatcacacccgaatgccttgtcacaaaccttacatttctatggtttctctccagtatgaactctcctatgtatttcaaggcgtgaattgaaattgaaaactttgtcacattcttcacatttgtaaggtttttctccgatatgaactctatgatgatgttcaaggtttgattttcaattaaaaaccttgccacattcattacacttgtaaggtttctctccagtatgaagtctatgatgacatgcaaggtttgatttgtgattaaaaaccttgccacattcattacacttgtaacatttctctccagtatgaatgaccttatgcattacaagagatgaattttgaacaaaggtcttgccacactcattacacttgtaaggtttctctccagtgtgaattacaatatgttgtgccaggtgtgaatcacgtctgaaagccttgtcacaaaccttacatttgtacggtttctctccagtatgaattctcctatgtctttcaaggtgtgattagcgactaaaaactttgtcacattcttcacatttgtaaggtttctctccagtatgaagtctatgatgacttgcaagatatgctttttgattaaaaaccttgccacattcattacacttgtgaggtttctctccagtatgaattgccttgtgaattacaagggatgacttgtaactgaaggtcttgccacactgattacacttgtaaggtttctcaccagtgtgacatctatgatggtatgcaaggtatcgcttctgattaaagaccttgccacatatatcacatttatattttttctctcctaaatggattatctgacatttttttaacagtgagctacaattaaaggctttgccactctcattacattggaaagatttttctctcatgtgtgcttcctggaggaaattattcccatacttattagaaatatgggttttaggaatacaagaaattctttgggatgctgaaactgaggaagcatcattgacagacttctcatcttgactatcaattttccctttgctctgcaatatatgcagttcaggcagatgtgaatgaaagcttgatccaagctgatctttaataggtttgtttccagcatgcctttgatcatatcagtctgtattacctgtcaacttttttatctctgtcatgagtgcttcatggccatttctttcatcttcttgccactgaaactcaaagtcctgaaaatctttctcaatttcctggaaggaaaaatctccagtgtgatgacttgcttgtctttgcaatgtccctgtgtggaacacttctgtattgccttgccttcttgatgagaacttccttgtcatgcatttggaagagatagctacaaaatataaacaacaataggtttccaattaagtgcagatggtaaataatactgaaatatgtaactaggacacaaaaaacaatatttattttgaaattcccaaacatgattttcaaagtttaagaacacaaaaggagtaaggttctttaataaataaagggcgattacaagtcctttaaatcatttctacagaagcctattcccaatatcatgacgaaacactgacagggcacaaacatgtgtaagcctaaagtaaggagtgtttttccactgtgaccctaaaatgtatcacagtttgcaaaaagcatattactgtcacatcaaagaaggaaaaaatatatattcttcatatttatagcatagagtatacaaataaatgctaaaggaccggataacgtactatattggtaaataatccacaacaagctcttgtaaggataatcaaaatcaatggaaattctgtattgtcaaacaatcacagcactgagaagataagaaaagaatacaaaaattagccaggcatggcggcccatgcctgtaatcccactacatgagaggctgagacacaagaatcaccaagaggcaaaggctgcagtgagtcaatatcgcaccactgcactccagcctggatgacaaagtgagactccatctcaaaaaaaaaaaaaaaagcagggcatggtggctcacacctgtaactccagtacttgtttgggaggcagaggcaggtggattacctcaatacaaaaagtagccggtagccaggcatggtggtgggcacctgtaatcccagatacctgagaggctgaggcagaagaattgcttgaatccgagaggcaaagattgtggtaagctgaaatcgtgccactgcactccaccctgggcgacagagtgatactccatcccccaaaaaagaaaatgtgaataccatatttttctgaataactgtgaaaaatttcctatatccatgtggaacaggcactttgtgactttttaaaaaaatgtttattatttttatatttttgagatggagtcttgctctgtcacccaggctggagtgcaatggcacgatcttggctcactgcaacctttacctcctgggttccagtgagtgtcttgcctcagcctcctgaataccttggattacaggcaagcaccagcatgcccggctaatttttgtatttttagtagagatgggatttcaccatgttggccatttgggattacgggcataagccactgcacccagtggcactttgtgacattaatgagtgcagtgtgtcagttatattgcatgccacatactgaatactcacatgtaaagtcataaaattcaattaacaaaatattgtaaccaacgataaaacaagaaaataatatgtacatttatacagcctgcagaattgtaaacaatttccacttaagaaaaaagccaaaacttctacttaccaccagcacacaatataagaactgaattacatgttaagatcactaccttctgatatatgaggtcaagaaaatacacagcattgccaggcgcagtggctcatgcctgtaatcccagcactttgggaggccgatgcgggcagatcacgaggtcaggagatcgagacctggttaacacggtgaaaccccgtctctactaaaaatacaaaacgttagccgggcgtggtggcacatgcctgtagtcccagctactcaggaggctgaggcaagagaatggcgtggacccgggaggtggagcttgcagtgagcagagatcgcgccactgcactccagcctgggtgacagagtgagactgtctctcacaaaaaaaaaaaaagaaaaaaaaaagtacacagcatttaaacgaataagaattgactaattgccaggcgtggtggtgcatgcctgtaatcccagcactttgggaggctgaggcaggcagatcacgaggtcaggagttcgagaccagcctggccaacgtgctgaaaccccatctctactaaaaatacaaaaaaattagctgggcatggcggaaggtgcctgtaatcccagctacttgggaggctgaggcaggaatcgtttgaatccaggaggtggaggtgtcagtgagctgagatcatgccactgcactccagcctgggcaacaggatgagactcaaactactcaactacttctcaaataagctttggtagatgtggtattctctaacaggatgttcctgcagatgcagacttggagagaatttagtcatgggtgttgactacctgtgaatactaaaagtgcatttataaagagacattaaagagctcattgcctgttcctctttcccccatgtcaggacatggcaggaagatggctgggctaaaccatgaagaatgctctcagcaggaaccaatttggctggcaccttgctcttggatttcccactttccaaattcatgagaaataaatttctgtgtctgaagcctcccagtttaagctatttctttttttgtttgtttttgagacagtcatgctctatcagccaggctgcaatgtagtggcacaatgattctcctgcctcaagagattctcccgcctcagcctggagtatcactctgacgcccaagctggagtgcagtggcacagtctcagcccactgcaacctctgcctccggggttcaagtgattctcctatctcagcctcctgagtacttgggataacaggcacttgccactgtgcccagctatctgttgtatttttagtagagatggcatttcactatgttggccaggctggtctcaaactcctgacctcaagcgatccacccaccttggcctcccaaagtgctggggttagaagcattagacaccagggccgaccagtctaagctatttttgacaggacagtgaaatgcctgagacaggaaaaggagcatctcatcatcagcctcacagaagacttacaaatcttattaaacaaaggaagttaacagtctgtactgtaaaacttgcaatacttgaagccatctaataccactaacaagttttcaaaaccttaaggcaagcagggcatggtggctcgcgcctgtaatcccagcactttgggaggctgaggtgggaggatcacgaggtcaggaaattgagaccatcctgcctaacacggtgaaaccatgtctttactaaaaaaatacaaaaaattagccgggtgtggtgacacgcacctgtagtcccagctacttgggaggctgaggcaggagaatcccttaaaatcaggaggtggaggttgcagtgagccaagatcgcatcactacgctccaggctgggcgacagaccgagactccatcttgaaataaaaaaaagaaagaaagaaagaaagaaaaagaaatgaaagaaggctaaagagtaactccaacccacaaatatatataaagttctccagtgaaggtaaataaaaggacagataggccaagtgcagtggtgcagcttatagcttgcagtgaacgccaagaatgaagtactcagataattccagctgagtggggcggggagcaaaccttctgagagagtgctgccccagaatccgtcctccaagtatttattgaaagggcttgtttagaccggtcgcggtggctcacgcctgtaatcccagcactttgggaggccgaggcgggcggatcacgaggtcaggagatcgagaccatcctggataacacagtgagaccccgtctctactaaaaatacaaaaaaattagccgggcgtggtggcgggcgcctgaagtcacagctactcaggaggctgaggcaggagaatggtgtgaacccgggaggcagagcttgcagtgagccgagatcgcaccactgcactccagcctgggcgacagagcgagactccgtctcaaaaaaaaaaaaaaaaaaaaaagggcttgtttaaactacacttcagacaaacaaaaaacatacaccatggagctctttgcagtcgggtcgtgaggcactatggccttgtaaaagcactcagaccacattcacaggagactgtttcagcgtttcttatcacacattctactccttgtcctgatttcagggtcaaggagtgacagtctcatacacaaacaacatacacacagtgcctcagtaattttccattcctcaatctcaaatgccttgtacataagcttatgttgccgcgcatccatcaaagttggttcacacccgtaatctcagcactttggcaggccaaggcaggtggatcacctgagtttgggagttcgagaccagcttgaccaacaaggagaaaccttgtttctactaaaaatacaaaattagccgggcatgatggtgcatgcctgtaatcccagctactcggggggctgtggcaaaagaatcacttgaaactgggaggcggaggttgcagtgagctgagattgtgtcattgcacttcagcctgggcgacaggagcaaaactttgtctcagaaataaataaataaataaataaataaataagtaagtaaatagacagatacagaaacctgtataagtgtatcttttctttataactcaacttttttttccaattatttagcagaaaaaagcacaaaaaaaacactgtacatatatgttaatgaaaatgcaacatatacagaaataattctgacataaataacaaagagttctagtggagaaagtagtctttgcaggttatggaaatttttgtttgtttctttctttgtttttttgagacggagtcttgctctgtcgcccaggctggagtgtaatggtgccgtttcggctcctgcaatctttgcctcttgaattcaaagatttcagcctcttgagtagctgggattacaggtgcccactgcacttcgaattttcagtagagacagagttttgccatgttagccaggctggtgttgaactcctgacttcaggtgatttgcccaccttggcctcccaatgtgctgagattacaggggtgagccactgcacctggccaggtaatggaaatttcaagttttgttattatgctataacttcaagatgtttaacacaccttcaacaataacctccccctaaatatctatacaacacacttcggttcttcatattgaaaggaatggacactaacgtggttgttatgttcacattggaatcatgcttaagccacttatatgtttactaaaaactaaaagacaaaactatttaaaataataataatggctgggcacggtggctcacgcctgtaatgccagtactttgggaaaccgagacaggtggatcacttgagatcaggagttcgagaacatcctggctaatgtgatgaaaccccgtctctactaaaaacacaaaaattagctgggcgtggtggtgagcgcctgtagtcacagctactcagaagctgggacacaagaatcgtttgagcccgggaggtggaggctacggttagaaagatcgcaccactgcactgtagcccgagtgacagagtgagacttcaccacaaaaaaaagtaaataagaagagagtcaaagcatgtctacagaaaaaaagtaattaaacacaaaaagtaggaaatgagaaatgaagaacaacaataaaaacctacaagaaatacagataatatgtaacaaaaacgcaacggtaaggtcttctccatcagtaattattaaaatgtaaatatttaactctgcattcaggaggcaaagactggctgaatcaacaggaaccaactacatgttgtccacagaagactcatattagccctaaggacacacatacgctaaaatttaaaaaataaaaaccaataattaggtatgggggttggggcctataatcccagctactcaggaggccaaagaggacctcttgagcccaggagatcaagaccaacttcaacaacacagcataaaactgaaaaataacctggagaaagcagggaaggatagtctgctggtttaccattttgatccctggtacagacagctcctctatttgtgccccctggcttatagcacaggctccatagctactgagtcagtgaatgaatgagaatgactgagtgatactagtatgtcttctctggggtctcatgtgtgccagggtcctatttgaccttggaatggtcttcatcgtgatgagggagctgagcaggagcagctgagcgggacagcccagagtccctcatgcagaccactctgcttgcccaaccggtaagaaggacaagtgtatgttcactcagaaacacatctggctgatccaacgggtcactgcctgaccctgagcaaacttacattggcaattaaagaccctaaactccgcagaaagaggagaggcttccttgctgcccggactctcaatgaagaaaaattcctggggtctaagacttctgacttggcaatgacattggcttaaatattcccagactcaaatccttgggtcttagttgggtcttgggatggtgcaaaccgatagaattgcaggcaatgagtgtcagaacagaacagcggacaggaaggtggaagacttgagggaggggatcaaggacaggcaaagaaaccactcccctccctcagacgcccacctggggaagcatcaactttgtcattctagagaagacaacgggaaaggaaggactgtgcatagggtaggtgacggtgtgtgctgggtggagagaaaaacccctttttctaaatgtgactccaatagctcagcccatttattctactaactgctgagcacagaggcatcctgtgaggataaatacggcttttccttcctccaattcctgaatctccaggccatgactagtgctgtaaccctcaaaatcccttcccaggacccagcgttccctctgtgggaaaaatatctgtgctccacatttagattatagcttatttatttattaacttatttatttatgttgagatggagtctcactaagttgccaggctggaatacagtggcacgatctcagctcactgcaacctctgcctcctaagttcaagcgattctcctgcctcagcctcttgagtagctgcggctacaggcgtgtgctaccaagcccagctagtttttgcattttttcaatacagacagggtttcaccatgttggtcagaatggtcttgatctcttgaccttgtgatctgcccgccttggcctcccaaagtgctgggaatacaggcataaactaccattcccggccatcatttttcatcttttatttttatttttatttttatttgagacagagtcttgcactgttgccccggatggggtgcaatgatgcttccatccagaagacagaagaagaaacctctgtcttctgggttcatgtgattctcctgcctcagcctcctgagtagctgggattacaggtgcataccaccacactcagctaattttttttttttttgtatttttagtagagacagggtttcactatgttgaccaggctggtgtcaaagtcttgacttcatcatccacctgccttagcctcccaaagtgctgggattacaggcgtgagccaccacacccagccccacatttacattataacattttgatcctcggctccccagctgccttctgactgtgtgtgtgggtgtgtgtgtgtgactgtgtgtgtgtgtgagtgtgtgactatgtgtgtgagtgtgtgactgtgtgtgtgtgtgcacgtgcgcacacactcatgtgttgtgacaggcaaggaaaagccagtagagagtcatcgccattggcctggcaggaggaggtggccctcaggctgcagttcacggtgctgtttgcactctgatccttggaagaatctttcctgaagtcacggagcctccagctgctccagaacagaactagttgtgtaggagtgtgtccttcatgcccctcaggtccctgaccttctccccacccttcctgaagggaatccaggaccctcactctgagtgcatcacctgctggtggcaaagcccctgcccatcatggccaaactgggccctggtgatgtgcagagcgtggagacccgggagctggagtgaggcagttgacacagatgacaaaaatgcagatgcctcggcactgcctgaggacacagggtctggtctgtagggcttttctggctttagtgaggtcttctccttttaatttgactgaaataaatagttacagaaagttcagatcaattagagttgaaatttccagaagaaatatgggaccatcctcacacttgccccagcccctcagtcttccctgaggacacctcagcatctaaatcacaactccagagtaggtgctgcagttgtcctgtggccaagatgagaactgtgcatcctccaaaggggagacacaaaacactcaaaataatccatgcagaagggcgtttctgcctgggcatggtggcccatgcctgtaatcttagcacattgggaggccaaggcaggcagatgacctgaggtcacaagcatgagaccagcctggccaacatggtgaaaccctgtctgtactaaaaatacagaaattgggtcgggtgcggtggctcatgtctgtaatcctaggactctagcactctagcggtctggaaggccaaggcgagcagatcacttgaggtcaggagttccagaccaccctagccaacatggttaaatcccatctctactaaaaatacaaaaagtagccaggcttggtggctgtctgtaatcccagctactcgggaggctgatgcaggagaatcgcttgaacccaggaggtggaggttgcagtgaactgagatcgtgccactgcactccagcctggatgacagagtgagactcaaaaatatgccaggaactgacatgacccactttagatttcgctgtgatgtcctcatacagagaaaggcctcgaagatggtctctgtgtctaactgaatctacacctctgtttctttcattctgcctttttttgttttatttttggggtactgcacctatttaaaattctagttacaactgaacactcctttctcacagaagaaaagccacgcccagacacgcactctattttgccaatcatttcaggggccagggtcactcgggttgagcttttctggtgtagcccctcatctccaagttacagggaggctcactggggccacaactgataagtcactgtcctctggctgaagaggggttgcagagggaagctgcctctgacgccatcattataaaagtcaccacacttagacacaggagtttggcaactctcattctcatctgtataatttaaacaaattttaaatttgttaccttataaacagagaaaacaacatgtcatcacttcatcgtcacatccaatcaactcaccgctcatctgcacccagggtcccccttcgtcttcattactgcttccctccatcattctgtacatagctctcattctcaccttctctgaaattgggattagccaggtgtggtagcacctgcctgtcatcctggctccttaggaggctaatgtgggtatcacttgagcccacaaacttgaggctgctgtaagccagaattgttccattgcactccagactgggcccaggagtgacaccctgtctcttaaaagaaaactttcaagtcagagacatattgagtcactagtgtagcttcaaatgcattacaaaatcagacacaaaatatctcccctaatttgtctccatttccagaatttacctgatgccagtgcacattaatgtatgactttcatatacagtttctctgatctggtccacaaagagctaaacgtccatccagatgtggcccctgaacaatccttgctgcccagcatcactgacaccacggagcccacaccccatctccatccatgtctggtgtgagcccttccaggaccatgcccagtgcagcctcttcctaagctcatgtcactaggttataagagatggaatttaagtgaagatgacagggactgagaaaaggcataagtgaatgcaagcaaatgtgtgaggcaggatgcttcagactcacaggagactgactactacaatacctggcatttcagaaaggaaagagacagattaatccaccgagaaatatccacttcacctgaggaagagccaccctggctccttttctttgctcttcttggtgtcttcctcatgtaacaggagtttttggaaatcaatcctgtttgtgaaaaaaaaaaaataagagatttaatgtttagaaaccactcactcctttcctgtgacaaaacacacacacaggggagacctcacccagtaggaagatggtcctctgctgcccaccacaccagagatcatgccaagataacaaagccccacaggaagacctacaagtgtaattttgacccgttttcagatcttgctcccctcctggaaaagtccacacacacactgcagcaggacacagaccttcagggcacagatctggccctaaccaaaccccatgcagagcacagccccctcagctccctgtggatcacaggctgatctcagctctcaacatggaggaaactgccttgattttcaatgctggacacagatgagaatcacctgcaccattgtaagaattattgagggtgggtttaatcctatgataatagcaatctctgataaaacagcttaaaagatgtatttgcaaaatgcctgagaaccctaatgtgaagccagggttgagctccactcagacagcgccagcccagcacagccccaccttctggctctgctctccacttcgggacttgttcccaccaggatccagtgaaaagcgaaggagcaaaaagaatcacaaagaacaggcaacatggaccagaggtgggggtgaaggtggagctgccatgtcaaatgggggactgtgggtgatcacaaacgtttccatagagaaagcaatgtcagaacaaagacttagggatgaaacactgcttgtcacttgtagctgaggggccagagagtcctgggcagagtgacatctcaggtgaaggcactgagacaaaagcaacctcagtcccagaaaaaggaaagaggtgtgcgtggctggagcagagggagtgaggaggacacaggcaggagatgacctcagagaggtcctggaagtgaagatccctagggacgaggtcttgaaacatttttctcccacacctcaaaagaattttggaaatgatgtatttcctcactcctttcatgtatacatgcaactttctctttacattgtaagttacaacactcacaaatagtggaatttatttcccatatttaaaatacatgctgtcagtttcagctaagctcccagaagtacactgtcgccctcatctgagaggtgtaggactgcaagggaatgtgtttgggggttcaagaagtcacttatgacttcttgacacatgaaggtggagatgcctgtttgatgtcccagcagagagctgaagagacaactggacacagaattgtggagctcaggggcgaggcctgcaggggacgtggagtcatacaggtgggctaaagcggtgagatgataaggttcaaggtgatttgattctaatctcattttttccttcttgtgcttttgttttttacatttttggaggactgaaatccatttaaaattcaaattacagctaagcacctccctgtcctaaaggaaaagccacacactccattgtgcccatcatttcaggggtcagtgtcactctgagcttttctggtcttctccctcacctgtatattacaggtgggctcagtgaggttcacagcgggggacgtttcaccaagttatcctgagaagctctgagttttgtaagaaggaggagtcgctgattttcatgtgatggccaggaagggtcaacaggctgcgttggtcatcttcctctataaaattccaggactggccacatgtggtggctcactcctgtaattccagcactttggaaggctgaagcaagtgggtcagttgagcccaggagtttgagacaaacctggcaacatggtgaaactccatctctaacgaaagtacagaaaattagccagacatggtggtgtgcatctgtggtcccagctatttggcaggctgactgggggggatcacttgggcctcagaggcagaggttgctgtgagccaagatcgtgccactgtacttaagcatgggtgacagagtaacactccatttcaaaaaaaggaaaaatattccaggaccatcttttatatccccaagcaaaagaaatgtctctttcaatgtccaaaattctgatggcacgaatcctaaacatgtaaatattttcccagaaaaatgacagtaatacattcaaaataaaaacaattgtgaacacatagctataggtttttaaaacactgaaagagaggcagtggtagaaataagctgtgagcaaatgttttcttcatgaacacgtgggctctgctgaaacaaggttccaagtcaatccagcccatccttcaacatctgcaaagaatattatggaccagaggaacttgaggagaatgtttacttagaaggtcacagttcaccattttatcagatgacataaggaaagaaagtagagtaacaggctacttgaactaaatttttatgttagcataaagaaaataggtcctagggtcaggcgtggtggctcatacctgaaatcccagcactttgggaggccagggcaggtggatcacctaaggtcaggaattcgagaccagcctgaccaacatggagaaaccctgtctctactaaaattacaaaattagctgggtgtggtggtgcatgcctgtaatcccaactatttgggaggctgaggcaggagaaccacttgtaccctggaggcggaagttgcggtgagctgagatcatgccattgcactccagcctgggcaacaagagtgaaactccatctcaaaaaaaaaaaaaaaagaaagaaagaaaatagattcttgacatctttatcaaatatgcattgaaacaacctaaaatcatttatcaggtactagaaagtgtttccaatatgtggtacagactagaaagcatgcagtcttcaatgtaaactggacacaataaatttcatagagaaactatattaaaatggttaaaaatatatacatctaatgaaatgtggggtcaaaggagaaaattttgaacacatagataaaaacaatgatgtgaggttgggtgtggtggctcacgcctgtaatcccagcactttgggaggccaaggttggcagatcacaagatcaggagtttgagaccagcctggccaatatggtgaaaccctgtctctactaaaaatacaaaaattagcctggcatggtggcgggggcctgtagtcccagctactcgggaggctaaggcaggagaatcacttgaacctgagaggtggaggttgcagtgagccgagatcgcgccattgcactccagcctgggcaaaagaatgagactccatctcaaaaaaaaaaatgatatgagctcataaaattctaccaaagcttatttgagaagtagttatttattttatgtttttgagatggagtcttgctctgtcacccaggctggagtgcagtgacatgatctcagctcactgcagcctctgcctcctgggttcaagcgattctcctgcctcaccctcctgagtagctgggattacaggcaccagccaccacacccagctaacctgtattttagtccagatgaggtttcaccatgttggccaggctggtctcaaactgttgctgttacattgggactgaatggaggaggacgaacacgggaatggagtatggagtcaaagacaaaagtatctgtttgcaagaagggatcgggggctctttgcttctagagaacaagagccctgagcttctacagcccttcatatttattgggtagagtaaacagagaggaaggggtaactgtcagtcaactatttaatttaacacaggtgtaagtgattgccttttttgttcaacaggctccagatgtttctgtagataatttcaaggaacatggcacctgggatgtgactgccctcagcattccttctggtggcagattcagttgtcaccttgccaactgctttcacaagaacagtttgctgtttgctcatacagcctccaatggtatactgagttgacaaccctcattccttcagtgtccaacatctccccctttatgtttttgcattaattgaataaaggtaattccaggctgtgcaactttcaattgccagttggtggtccacccagtcttacagactataaacagaaaacagagacataataacattgttcctataagtctaaaagagacattaaggtgatgtttaacgtaggtctaaggattgagactttctaaaccctgctggaattctgtccaagtttctaaagaaggttgaaactcttgagtctgcttattcaagtcaagaattttactttgtatttcactgatatcaaaagcgacattggatgtaaaagccccctgaatatgggcttttacaaggtcccatggatattcgatttggttatattccaaattggctacacaaatgtgagtatggttaaaatgacagtgcaattgctgttgccattgtaaactctgtatttgctcccctaaccacaaaacagtagtctttaacattgccacctaagtttgtaattcagtattaatttgattttgaagcatccatgcctggtcggctgtgcacatccaattttccatatattgggctgtttaaacagagctgtgcagtgctactgaggacaccacaacagaggttattagtgtgactaaggaaacaatagcaaaaattaccatacccaagactctaggagcatgatgagtgagctgagtgagaaggagtttcacaaagtgtaaagccagggcagcagcccaaggttcagacagattgacagggacccatatccaagaatgacatttaccttcttagaaaaacacaaactgtaaattgagtggtaatattccttacaaaggtaacattaaaactgtgttaagtaacattattagtattggagagtgtcccaacccagatgctgccgttcgtaaataggagtgctgctttccatatcgactcctgaattgggcccctctttccttgatgctgccactgaggcaaaggcgagctaaagcctgctctgtgccaagcaagccgcacagccgactgggattgaatcccagtgtgatgtagtgaagagatgttgaaggtctgccaccagtgccagcgaagtttgtgccatgaggtctgattctcatctcttccatctaattaaccacggggtccccagtcaccaatgtctcccattagcatagactgttgtctagctaaaggaccaagacattgggtccaaggaggggggtggtgagaactatcaaagggagcccattctgtataatcaatacaattttggtgatgggggcgggagtggttgatgagcacactagttatattaatagagctaaggcctaataaatacataacttttccatggtgactcaaccatgcctggggttggactgcaagacaactgtggttgagtgacatatctttggtgatgcataaagggagtccctccaatggggcggtataactgatgctattgttgtgagagtttaattgctctatatcagggggagttaggggccctagagcccacgctccctgatcatgatatacctcaggaggaatgtcactccagagtacaggtcacactacagggtgattaggaacatatgcccagtatgttttggcctctacacaggggaaacatacctcacaggacactactgctaacatggccaagcacatggatgctccagcattttctcagcttcctgctttgttttcttgatctgtccccatgttatgggggtggatgtcagtgtgactccagtcggcccttgctccatctttgcattcaaattcagctggctcacgactcctactggagggaccaggtccacggttggccaacgtgggtcctgctagtctcccatttcatggtcgcacacacctggagggcacccacatggtttgtccatctcctgtaaaaacacaagcatactctcgtccccacatcagcaattccaccgggcctttccactgtccctcatctggagatttccataacacctttgggtaaacttgcctcttttcctctaacacttgccaatgtcgttctgctagtcttaccgtctgtaccaggagtcaaaaagtttaaagtaagcaaggctaatgtaattttgcctgaggtggtagttggtctcctattccccctttttgttttttcaacatacgttgtaccgtttgatgtacccactcagtaaggccttgccctcgaggattgtaaggaattcctgttttatgggtgactgcccataactaaaaaattttgaaaggcatcactagcataagcaagttcattgtcagttttcaattgtttagggacccccctatatgggcaaatgacaacaatgtcaccaggcatgaccagctatttcccctgtttggcatgtggcatgcagcatatgggagtaggagtctatagtcacatggacatagctgagtttgccaaaggtggctatattggtaacatccatctgtcagatttcatctggagccaaacctcgtggggtgcatccttctacacgggcaacaccagggacatactggcaagtggggcaggcttgcacaatagcttaagcttggctgcaaggcagatgaaacatacgagtaagtgcagagttgttttgatgcagtaatgcatgagaagcttgggcttgttgaaatatagaaccgatcagtttatctgctctatcattacctagagatagtagtccagggagttgtgtgtgagagtgaatatgagaaatatgaaaaggggaagcatgagagcaaatagcttattggagtcttagaaacaagttaagcagttcttgttctagggtactcttaatagtggcagtctcaatgtgactggctacattcacaacataggctgaatcacagacaatattaataggagataaatctggaagctctaaaaccagaataactgcgattaattctgaacattgagctgaaactgcagaggtctttattgtttgagtgtgtttaggtccagaaacagctgcgtgaaatttggaggaaccatcagtaacataggtctgtccacctgaaataggcctgtgatgagtaatcacaggaaggatgaaagggtgaactttagaaaattgcgagattctttttttttgattgcttttgtcacccaggctggagtgcaatggcacgatcttggctcacggcaacctctgtctcccaggttcaagcaattctcctgcctcagcatcccaagtagctgggattaaaggtgcccgccaccacaccaggctaattttttaatttttagtagagatggggtttcaccatgtttttcaggctggtctcgaactcctgacctcaggcgatctgcctgcctcagcctcccaaagtgctgggattacaggcgtgagccactgagcatggcctaaaattgcaagattttgtctgatggataatggttacctattattcccacaaaatctgcgagagtgatttgccaaccagtcaacatctcccaagctgcagcctgctgtcaggaatccaaaggaacaataattttattaggatcatatcctgtaagcattcctgatctatgcctgcctattgtcataagttgtataattaaagaaagataaacttacaaagttttcactgtctgattggataaaaagagccattctattaccattatggatttctctatgaattggcctaaaagtcctgttggacaatgaggggtaggaagaataaaaaaagcaaaggcttttgtgatttcagccgaaaggcctgtcgtgttgaagcatctgctctacaagctgtaactcagcttctgcctctttagtaagttgccaaggggaatctaatgaagaatctccttggagggtttgataaaggtgtatgagttggtaagtagcaatacctagcatcgtgcacagccaattaatatcccctaataattgttggaaaccgttcagagtttgtaacctgtccctatggacggctactttttgaggctgaacatttctttcagtaaaaatagtacctaagtactggtatggggcggttctttgtaccttttcaggagctattttgagattccattcagttaaggcctgctttatttctctgaataactggtgtaatatttgaactgtaggagcggccaaaagaatatcatccatataatgaacgatgtaggcagtgggaaacatattctgagagtcctttaatgctcttcctacaaaatgctgacttaacgtaggtgttgagcatgccctggggtaaaactttccattgataatgagagacaggctctctatgattaatagagggcacagagaaggaaaatcgaggcttatctttctcatgtaagggtatagtataaaagcagtctttaagatctattactacgagaggccaatctctaggaatggctgttgggaatggtagaccttgctgtagtgcacccatcggttcaatctgtgcattaatagctctcaaatcatgaagcagtcaccattttcatgacttttttgggatcacaaatactggtgaattccaggggctgactcctctgtatgtcctgaatccagttgctcttttaccagctgatggagttgagtcagtttcttctgtgatagggggcattgattcactgccacacaggtttatcagtcacagggaggctcactggggctcagagcggggacattttcaccaagttaccctgagaaggtctgagatgagtgagaaggtgtgtctgaattcttacatggaggcctgaaagagctaatgggaagggttggtctttatcacccctatccttgaaaattagagaagcatctttcatatacctgggctaaagaaacttcttttgcaacgttctgatgccactgactcccaacatttaattcttccttacaagaaaatcacagtaacatttataaactgcagaagtgtgaacacacagctattgactgtgaaaacagtgaaagaagttcagccgtagagctaagacataagcaaattttttcaatcaagaatacatgggtggccaggcatggtggctcaggcctgtaatcccagcactttcagaggtcaaggtgggtggctcacctagggtcacgagttcaagaccaacctggccaacatggtgaaaccgcatctctactaaaaatacaaaaaattacctggtagtggtggtgggcacctgtaatcccagctattcaggaggctgaggcaggacaattgcttgaacccgggagacagcagttgcagtgagctgagatctcgccattgcactccagcctgagcaacaagagtgaaaatacatctcaaaaaaaaaaaaaaaagaagctgggcgcggtgactcacgcctgtaatcccagcactttgggaggccgaggcgggtggatcacctgagtgggttcaagaccagcctggccaacatggtgaaaccccatctctactaaatatacaaaaattagccgggtatggtggcaggcacctgtaatcccagctactcagggggctaaggcaggagaatcgcttgaacccgggaggcaaaggttgcagtgagctgagatcacgccactgcactccagcctgggcaacaagagcgcaacttcatctgaaaatgaaaaaagagagaaatggagaagaaccagaaagaaaaaagaggaaatctattacacaatgagaaaaaaagcgcttttgatattccttttgttttttattttttgtttgtttgcttttttgagatggagactcactctgccacccaggctgcagtgcagtggcacaattttggctcactgcaacctctacctcctaggatcaagtgattctcatgcctcagcctcccaagtaactggaactacagatgcacgccaccacgcctggctaacttttgtatttttagtagagacagggtttcaccatgttgaccagggtgcttttgaactcctgactttaggtgattcgctcacttcggtctcccaaagtgctggaattacagtcatgagccaccacgtccggctttgatgtcccttttaaaaagtattatgggctgggtgtggtagctcacacctgtaatgccagcactttggaaggccaaggcgggtgggtcaattgaggtcggaagttcaagaccagcctaacatagagaaaccctgtctctgctaaaaatacaaaattagctgggcatggtggtgcatgcctttaatcccagctacttgggagactaaggcaaaagaatcgcttgaaccggggaagtagatgttgtggtgagccgagattgcgccattgcactccagggtgggaaacaaaagcgaaactccgtctgaaaaaaaaaaaaagtactatgtaggagaagcgtggtggctcatccctgtaatcccagtactttgggagtccaaacaggaggatcatttaagcccgggattttgagaccagcctgggaaacacagtaaaaccccatttctacaaaaaacaaaaacaaaaaaacaaaaaaaaacaaaactagccgggcttggtggctcacgcctgtggtcccaactacttggtaggctgaggtaggaggacagcttgagcccaggaggtcgaggctacagttagagatcacgccactgcactccagcctgggtgatagagccagacactgtttcaaaatattatttaattaattaaattaaaagtcacatgtaataacagaaagtgcttttgtctccccacttcactgccccacttcctatgccaccctgggaaaagggaagagagtgactcacaactgaataagtcactgccctctggctgaatagggattccaagtggaagctgacctctgatgccaagatttatagaatgtacatgactcatagataggaattttaaaattctcaatctcatctgtataatttaaacaagtttttagttattagattatatacacagaagtcaacatgtcacactaatcatatccaatgaactcacccactcatctgaacccaaagtccccaccccttttattcttttgagacagggtctcactctgttgaccaggttggagtgcagtggcatatctcggctcactgcagcctggatctcctgggctcaagtgatcctcctgcctcagcctccagagtagttgggattacaagtgcgcaccatccccttctttggtctatttcttctcttccacctcttctgctccatcctcacaacttacttaacctcttgttgcttcttcttcccagtctttcgatcgtcctcaatctccatacattaccacctcttctcccacctctgcgcctcctctgctctccctgttaaactctctcttccctgttaaaccccctgtccccactctctggcacccccgacctccaggtgtcctccctgctgtggttctccctcttgccaccagcaccactctgctctgtctgccctggctccaaatccctcctcctctccctcactctgatgagccaggtccccctctttgctgcccctctccctaccttgctgtccttcatctctctgtacatctagcttctctccacatttctccagttttctcctcctgctatcttaactttttcttttcactcttgctgtctcttggcaaatccctcacccatcctccaccttgccatctgttatgggcctttctcattgttctattctctgtctcgagttttctactgcccttgctcggtctcctgattcctttggcccacacaatcacaggagagttttgagtaagacgcctgcatcccagaggagtgcattttccaggggctggggctgggcaggcaagaacaccccttgtcacaggacaagccctgggcacctccccaacgcggactcagaggaagcggcgactgctgaggggagacctggcgagcagcagggcccggcacgaggagggagttagggggcgacggctccttaagacaagggtggggtctgcaggatcccaggaccaggcagaggatgcggcctcctcgggacgggggaggcggcgctgcgctccagggaccgacgagggtgagggtgggaggcgcccagggtgggaatccacctctcgggtgaggactttaaaaagcacggggtggagggagtcagaaaatagttacaaacaggaaaactacgagatacgaagtgtatacgttgccctatagcagaaagaccggggacgggtctagcctcagggcgactttaaacccaaaaggaagcgacttctggactctcaccgggacgtcaaattttgctctggggattagccgggcctggtggcgcatgcctgtaatcccagctactcaggaggctgaggcaggagaatcgcttgaacccaggaggcggaggttgcagtgagccaagaccgagccactgcactccagcctggcgacagagcgagactccgtctcaaaaaaaaaaaaaaaaaaaaaaaaaaatttgctctgggcgaaggaagaatggtagaaatttccaggtatgtggggaccccacgtcccctgggacagaagtcccagggacctgcggagcgcagacataacacaacacagagcaaaactcaccgctgcggtgactttcactccacgcgatccgcttcccggtttacgctaaactgggcgctcgggacagaagccaggtctcggcgggacatggcagggggtgggcggggcctgggcgaggtgggggcggggcgcgaggcggagagaccttcccctatagaaccggcagggggcggggcgcgaggcggagagaccttcccctatagaaccggcagggggcggggcgcgaggcggagagaccttcccctatagaaccggcagagggcggggcgggatctgtgagtctctcagcctcggcgtgtttttgggttttggagacgagacctgccaggaaagctgaggcatgattcaaaagccctggaactgtctggaaggggaatgcaaaccagaatgtgaaatgcaaagccctgcctgggcggaacgtattatttcatgctgacgaccacagaacagaatagaaatcctctccctttctattctccactcactcaagagggagagtccaccctgtgtcagcttcagagacttccctagagccaccgcctgggatgcgggatggagtgctcaggccagggaggagtgaggtcaccacctgctggttaaacacagcagagatgcgggcgcacaagggggcgtgggagggcgcggggtgggatcctgagttcccagctactcaggaagcagcggcgggaggatcgctgagcctggggctccaggccagcctgggcgataaagtaacaccccctcccgcaggactcccttcctcgtcactctctctctgttttttgttttgttttgtttttaaactttcgtaaataaaattttttatggtgtgagacagggatccaacattatttttttccatgtggatatccagttacttgtcccagcacatttgtggaagagctctattactttcttttttcacttacttttttcttttctttttcttttttatttatttatttattttttttgagacagagtatttgtctgtcgcccaggctgcagtgcagtggcgagatctcagctcactgcacactctgcctcctgggttgaagcgattctcctgcctcaacctccagaatagctggcattacaggcgtgcgcccccatgcccggctaagttttgtattttttggtagagacgaggtttaacagtgttggccaggctggtctcgaactcctgactttaagttatctgcctgcctcagcctcccaaagtactgagtttacaggcgtgagttaccgtgcctgtcccaagaaataccctttttctttctttcttttttgagacggagtctcgtattgtcaccccagctgctgtgcagtggcgcgttcttggcttgctgcaacttacgcctcccgggttcaagcgattctcctgcctcagcctcccgagtagctaggaatacaggcgcctgccaccatgcctggctaattttttgtctactaaaaagtagagaccaggtttcactatgttggccaggctgttcttgaactcctgacctcgtaatctgccccactcggcctcccaaagtgctgggattacaggcgtgagccaccgcgcctggccaagaaatactctttacttcactttttaaatgttgagaaaatataattgaaaacaaaaaaaatcttcccctaaatgagatatcatctccaccacgataataaaagactttgccacatacatcactttcatattgtttctctccctctcccaaatggattatcggatgtttccttaagagtgagctacaattaaaggctttgccactctcactacattggaaagatttttcggccgggcgcggtggctcacgcctgtaatcccaacactttgggaggccgaggcgggtggatcactaggtcaggagatcgagaccattctggctaacatggtgaaaccccgtctctactaaaaatacaaaaaaattagccaagcgtggcggcgggcgcctgtaatcccagctactcgggaggctgaggcaggagaatggcgtgaacccgggaggcggagcttgcagagagccgagattgcgccactgcactccagcctgggcgacagagcgagactccgtctcaaaaaaaaaaaaaaaaaaaaaaggaaaacagcaagctatcgtgtttcctaccttcaaaacacggaaattttcaaaacttgcaggataaaataccacaacaaaacatttatcatgccgagctcagtggctcacgcctgaaatcccaacactttgggagtctgaggagggaggatcacttgaggccaggagttccagaccacctggccaatatggtgaaaccccatctctactaaaaataaacaaacagccaggcttggtggtgcacacctgtagtcccaactactctgaacgctgaggcatgagaatcccttgaacctggggggcggagtctgcaatgagctgagattgctccactgcgctccagtctgggtgacaggcgcattcatcaaagaattttttctaaaatctcaaaatggtgtctgaatacatttctgtaggacttacgctgacttgccacagaactctcagcagtgattccccattgagccatgggaacgggtggaaggctggacaggaaaggggatgcgtaagtgaacttttctttgaatttttactacacaacacatatatacattgtgtggtctttaaaatttaaaaaaattaataatgggtagaagaagaatatggctccatcttctctaatgataagttctgctctgacgtcagaacaaaattataatcatttttacctaaaatgcctgcttcatcagagttcctgcaaaaaaaaaaaacactttttttttcttttttttgagacagagtcttgctctgtcacccaggctgcggtgcagtggcgagatctcggctcactgcaacctccacctgccggattcaagcgattctcctgcctcagtctccccagtaggtgggactacaggctggcctgccaccacgcccggctaattttttgtatttttagtagagacggggtttcaccgtgtttcgatctcctgacctcgtgatccgcccgcctcggcctcccaaagtgctgggattacaggcgtgagccgccgcgcccagccaaaaaagaaaactttaataactttaaacatcagccatcacacggtgtgtgtgcgtgtgtgtgtgtgtgtgtaaataatctaggtaaactacaaaattagccgggtaaatgtaatggaatacatgcttgtaaacaaacttgtcataatttgtgatctaaggttattatttgacattagcaatctgggtaatttccagtttaagaattacaggggccgtggtggctcaaccctgtaatcccagcactttgggaggccgaggcgggcggatgcacgaggtcaggagatcaacaccagcctggccatcatggtgaaaccccgtctctactaaaaatacaaaaatcagctggccgtggtggcgcgcgcctgtagtcccaactactcgggaggctgaggcaggagaatcgcttgaacccaggaggaggaggttgcagtgagcagagattgccccactacactccagcctacgcgatagagccatagagcgagactacgtctaaaaacaaacaaactcagtctaaaaacaaacgaacaaaaaaacaacaacaaaaaaaaaaagaagaagagaaaatacagttacaaattttctaaataaatgtcctgagaaaagaaaggaagggaaagttgtccttcacctccagtgtgcaataggcagttccacatgcaggtcaccctccatgttccattatccgctcaaacaacacaggacctcgcttaaacaagccgttttctggggtttttttgtttgcttgattgtttgtttgagacggaatcttgctctgtcgcccaggctggagtgcagtggcgcgatctcagctcgctgcaagctccgcctcccgggttcacgccattctcctggctcagcctcctgagtagctgggactacaggcgcccgccaccatgcccggctaattttttatatttttagcagagacggggtttcaccgtgttagccaggatggtctcgatctcctgaactcgtgatccacccgcctcggcctcccaaagtgctgggattacaggagtgagccaccgcgcccggccccttaagctgttctaattctcagtcctggctgcaaccagcgccacactccacccttttaccgaggtccttgcccctcgccctccccctaccccagctaccccaggctgcggggagctcgccccgcctgcaggacgggcgtctttacctgctcacaaaaggcactttgcatttaaaccattttcaaattaagaagaaaaacaggtaattccagcactttcggaggccgaggagggcggatcacctgaggtaaagagttagagaccagcctggccaacatggcgaaactccgtttctactaaaaatacaaaaattagcccggcttggtggtgggcacctgtaatcccagctactcgggaggcggaggcaggagaatcgcttgaactcgggaggtgaaggttgtggtgagcccagatcacaacattgcactctagcctgggcaacaagagcgaaactccgtcttaagaaaaaaaaagaaaagaaaagctaccagttacacagcagggctcctcagaaagcagggggaacacctgtttcaagtttttcttgtataggggcctacgtaaaagctaactgccggtgggctgatggtgtgacaaaacttactactttgttgatttaaaacgatccttggtattttagtgtgcaagtacttgaaagcatggctgtaattatcttagaagcacacattgtcatgagatattgggtcatgtggacattgtgtttctgtaggagtttgtccttgcaaatatcattaagctgctttccttaaccattaacatcttatgactttgactcgcgcagtaaggagtacgttttcctagttttaatggacttgagctttgacatcctggttctcctaggttcctgcttaacagtgtatccactcatgcaccacagagtctcagcaccattatggaagacaccactctagtaatatatcaaagacagactgagcatctactccaataacataaatagtaatagcaatgctacggaaaatattaggaagtttaatgtatgtatacaattgatcatttattattttcagttttatattggctaaaactacattggatgggttattttaatcaaatattagaaatatctttcaaaactgcgatctaatataaacacacacagtttgagaccatttcctctatgttcaatatatatgaaagagttcagatttatgaacttattttatgtttttcattagatctagtttgttttctatcttgatttcttctgtgttcatgagcttgtgaaccaaaagtatctaataggtctcaattaatttagaaagtttactttgccaaggttaacgatgtgttttttgcagccaatgtggtccagatgcagctgggttttatacattttaggaagacaggagacataaatcaataaatgtaagatgtacattggtttggtcttgaaaggcagagtaatgaaaatcagagacttccaggttataggtagacaacagataaatgatagcatttttaaaatttatttttatttatttatttatttatttatttatttttagagtcttgctctgtcgctcaggctggagtgcagtggcgcaatctcagctcactgcagcctctgcctcccgggttcaagcgattctcctgcctcagcctcctaagtatctgggattacaggcacacgccaccatgactggcaaaatgtttaaattcacctatagcctgaaaccaacccatcccgctttgagttgccccacctttctggaccaaaccaatgtatttgttaaatgtatctcattgatgtttcatgcctctctagaatgtacaaaaccaagctgtgcccccaaccacctgtggcccatgttctcaggacctcctgaggactgtgtcatgggccagctcactcatatttggctcagaataaatcttttccagtattttacagagtttgactcttttcatcaacactaatattgctatgtcattaatttctaaatatattgtaatttcaaattcaccatgtgcattctgtaataagacaaatttcattttaaaattgtaacgtattttagatattttctttgttttctgtttctcaatgttctgtcacgtgtggatagcaaagccaataaaatactcttcagaagtcatttagatttattttcccttagagaaaaaataattttgcaatatttctaaagataaatggcaggcaagttattttctttcataggaactctcaagaaaggacaactcggccaggcgcactggctcatgcctgtaatcccagcactttgggaggcagaggcagggggatcacgaggtcaagaggtcgaggccatcctggctaacacggtgaaaccccgtttccactaaaaattagctggatgtggtggtgcgcactctagtcccagctactcaggaggctgaggcaggagaatcgcttgaacccgggaggcagaggttgcagtgagccaagattgcatcactgcattctggcctggagacagagcaaaaaaaaaaaaaaaaaaaggacaactcaattattaaatgtttacaagtagcctcatttcttcaggcaataattccatggcaatctccaacttaacatgtaatatggaagtatgttttcctgtcacagcattataattctgtattatgcaatattgctaagtagccaaaaaagaacactgagcctggacttccatgcttccatgcaaaaaaaaaaaaaaagaattgattgtgacagtttttgttaacctcagaacggtagacaagaagctgattgtagcggaaagtcatgattccattttgtatatgtaaagttttgttgcttctagaaatgtcaaggaagcaacatggacatactgattcacaagaaatttaaaagaatatttcctgccgggtgtggtggcccacacctgtaatcccagcactttgggaggccaagtcgggcggatcacctgaggtcagtagttcaagaccagcctgaccaacatggagaaactccgtctctactaaaaatacagaattagccgggtgtggtggcacatggctctaatcccagctactcaggaggtggaggcaggagaatcacttgaacccgggaggcggaggttacagtgagctgagatagcaccactgcactccagcctgggcaacaagagagaaactccatctcaaaaaaaaaaaaaaaaaaaaggattttcttaatcacagaaagattttgacatatacatccttgtaatatcattataagagaaatgcaaagtaattagatgtttccaaaaagttaaaatagaaactacttgttttttgaaaaagggtctcactctgtcactcaggctggagtgcagtggtgccatctcagctcactgcagcctcaacctttctggttcaggtgatcctcccacctcagcctccctagtagctgggactacagggcgtgccaccacgcccagctaatttttgtattttttagtagagatgggtttcgccaagttgcccaggttggtttctgactcctgggctcaagccatctggccgcctttgctttcaaacgtgctgggattacaggcatgagccaccatgcctgaaactactttcatctattgagcttatattatagccagtgtcacaggaaaaagcatgtgcatattctaacacagacggaacaatgaaaatgtttactactgggccgggcgcggtggctcatgcctgtaatcccagcactttgggaggctgaggcaggtggatcacaaggtcaggaaatcgagaccatcctggctaacatggtgaaaccccatctctactaaaaatacaaaaaattagctgggcgcggtggtgagcacctgtagtcccagctactcaggaggctgaggcaagagaatggtgtgaacccgggaggcggagcttgcagtgagccgagattgcaccactgcactccggcctgggcgaaacagagagactccgtctcaaaaaaaaaaaaaaaaagaaaactaaaaagaaaatgtttactactgtcaaaaaacaaatttagatattggttagattttattcaaaaggtatattgcaatagggaaaatgctccaaccccaagatctgcaaatatatgagttgcacagaaaagggcttctcttttataaggagaaggaagcaaggttagaaagcgccaggtacagggcagtggataagcatctgctgtgacctattcagtgaatattttatcctaaggtcagcttactcttgggatgggacattaaaaaggcaaagttgggctggacgccatggctcatgcctgtaatcctagcactttgggacaccaaggcgggtggatcgcttgaggacgggagttcaagaccagcctggccaacatggtgaaaccctgtctctactaaaaataaaaaaattagctgggggtggtggcacaggtctgtaatcccagctactggggagtttgaggcaggagaatcacttcaacccgggaggcagagcttgcagtaagccaagactccatctctaaaacaaacaaacaaacaaagagaagttgttctcaatcacagtgcccatatgtggttaagaaatagaggttgttagccgggcacggcggctcatgcctgtaatcgcagcactttgagaggccaaggcaggtggatcacctgaggtcaggagttcgagaccagcctgaccaacatggagaaaccctgtctctactaaaaatacaaaattagccaggcacagtggcgcatgcctgtaatcccaggtactcgggaggctgaggcaggagaatcacctgaatctgggaggcagaggttgcagtgagccgatatcatgccattgcactccagcctgggcaacaagagtgaaactgcctcaaaaaaaaaaaaaaaaaaaaaaaaaaaagagagagagagagaaatagaggttgttctgaatttcaatggccaagaatagtccaacagtcaggggcttggagaaacagggaagcctaaggtttgagtaagttaagaagcattgtttccaccatcagtgagaaatccttgatgagacaaaccgtgggaatttggagttttttcttatgtaaacaaagagggtaagctttgaagtaagctgtttctagggaaaacaaaaacaagggattgggcaggggagtggtttccggtgggttttatttgtttttttgtttgtttgtttttgtttttgtttttgttttgcttttgccctagaggcctcaagaggcctggggaacatgtgctcctctggtggtttcttcaatctttgctatttcttcaaccctttactaggtttacagggttgtaataaacttcaacactgtcaccacacgtaacataaaacaaaatttaaaaaataataaatataggccaggcgcagtggctcacacctgtaatcccagcactttgggaggccgaggcaggcggatcacctgagatcaggagcgagaccagcctcaccaatatgaagaaactccgtctctactaaaaatatacaaaatagccaggtgtggtggtgcatgcctgtaatcccaactactcaggaggctgaggcaggagaatcgcttgaacccaggaggcggaggttactgtgagccgagattgcaccattgtactccagcctaggcaacaagagcgaaactccgtctccaagagaaaaaataataatacatgtgtagaatttgaaaaatagaactaaaaataggaacaatagcgatgttgccccatacctcagtttttgaatggaacgaaagggccttgagtgttcattttggctgtgtgttattcattcctatcacatacaagagacattagtaattattggaagatatggctctaaatctctaaattcaggggtctgtgtaactgttaaattgaacagaaacctagagatatattaagacaaatagtgggctgggtgcgatggctcacacctgtaatcctagtactttgggaaactgaggcgggtgaactgcctgagctcaggagtttgagaccagcctgagcaacatggtgaaaccctatctcaagtaaaaatacaaaaaaattagccaggcgtggtggtgtgagcctgtaatcccagctaatcgggaggctgaggcaggagaattgcttgaacctacctgggaggcagaggttgcagtgagccaagatcacaccactgcactccaacctgggtgacagagcgagactctgtctccaaaagaaaaagaaaaagaaaaatggtgtttccttttccattttcctgctgaccatggaaaaacacactctcacagttttatcaattctttggtaacaattacaaaatgcaagcactggttcacgtcgacagcccagagtccgcaaatcctctgctctgagcccgtccggacttccccgatcccagccttctctcctttgaaaacactaagaatgacatcactgcatcagtttttactagagccaatcacctgtcgtgcctggaacagggatcgtacccagattgccctcagtcctgataatcaggaagcgcacatctataagaagcatgggagccagcgagtgaaagctcgtgaactcagtgagcacaatggacatatcacaggcattcactgggctcccaagagcgaccgcatcgtcacttgcggggtagactgcaatgcctatgtctggagtcagaaagatggtgtctggaagccaaccctggtgatccttagaattaatcgtgcagctacttttgtgaagtggtccccgctagagaacaaatttgctgtgggaagtggagcatgactcatttgtttgttactttgagtctgaaaatgactggtgggtaagcaagcatattaaaaagccgattcgctccacagtcctcagcttggattggcatcccaacaatgttttgctggcagcaggatcatgtgacttcaaatgcagagtgttttctgcttacattaaagaagtggatgaaaagccagccagcatgccctggggcaccaagatgccttttgggcagctgatgtcagagtttggtggcagtggcaccggtggctgggtccacggggtaagcttctctgccagtgggagccgcctggcctgggtcagccacgacagcaccgttatctgttgctgatgcctcaaaaagtgtgcaggtctcaattctgaagacagagttcctaccactcctgagtgtgtcatttgtctcagagaacagtgtcgtggctgctggccatgactgctacccaatgctctttaattatgatgaccgcggctgcctgaccttcgtctccaagttagacattccaaaacagagcatccaacgcaacatgtctgccatagaacacttccgcaacatggacacgagggccacgattgaggaccacaacatggccttggagaggctgcaccagaatagcatcactcacgtctctatttatgaggtagacaagcaaggttgtcgcaaattttgcactactggcattgatggagccatgacaatttgggatttcaagaccctcgagtcttccatccaggtcctccacataatgtgaagctgagtgagccttcgccatctagcatgacaaactgtggccaaccgcagctgtgccgtggcacgatggcgaggaagctagacccaaggaaacactgaaaacacatagcaggccaatgctgtgtggttttgtttgaatataaaattggtgaaaatgctggtttttttaaagcagtatttttttttttatttttttattttttttgcgatttcattccattcttgaccaaagcttccctttaagtagtttattatggaaaattgtcacactaacttaaaagacagggtgagggagatatgtaaattgtccactagaaaattaaataaaagaactaaatgtgggaaaaaaaaaaagaaagaaagaaaatacaagcacttaggtcgggtgcagtggcttacgcctgtaatcccagcactttgggaggctaaggcgggtggatcacctgaggtggggagtttgagaccagcctgaccaacatggagaaaccccatctctactaaaaatacaaaattagccaagcacagtggtgcatgcctgtaatcccagttactcgggaggttgaggcagaagaatcgcttgaacccaggaggtggaggttgcagtgagccgagatggcgccactgcatgccagcttgggcaacgaaagcggaaaaaagaggccgggcatggtggctcacacctttgggagcactttgggaggctgaggtgggtaaatcacctgaggtccggagtttgagaccagcctggccaacatggtgaaacccatctctactaaaaattaaaaaaaaaattatctgggcatgctggcgggcgcccataatcccagctacttgggaggctaaggcaggagaatcccttgaacctgggaggcagaggttacggtgtgccgagattgcaccactacactccagcctgggtgacagagtgagactccctccccaccgcccccccaaaaaaaaagaaaaaagaaaagaaaatactagcactaatttatatgtcagattcatgtcacatctcaaattcatctaaattttcttgacatccctttttataccagtggagccctgatgaagacacttaatagaagttttctctctatcagagaaataagttgatgagaataaactcaacgaaggtgaaaattctgtttttttctgtgacctgggggaaaaagcttaaggtgaatttacattcagattggttatacagagagaacatacagaagtggatgaactcggtgtaattaagtttttctatccacaaaccaggtgaaagtattgcaggaggcagatagcgaggcatgagcaggtaaggagattctgtgtcacccgcaaggggtcctgatccagaacctaagagagggttcttggatctcacgcaaggaagaattcaaggtgaatccatacagtaaagtgaaagcaagtttattaagagagtaaaggaataaagtatggctactccatagtcagagcagcctcctgtttcatcctatgactaagaatgccttcacttactgggaatgtaacccagcaggtctcaggcttattttctccagcccctattccagatggaattgctctggttcaaatgtctctgacactttggaaaggaatatttagaaatgcaactcactggccaggcacagtggctcatgcctgtaatcccagcactttgggaggccgagacaggtggatcacgaggtcaggagatcaagaccatcctggctaacacagtgaaactccatctctactaaaaatacaaaaacttagctggcctggtggtgggcgcatgtagtcccagctactcaggaggctgaggcaggagaatggcgtgaacccgggaggcggagcttgcaatgagccgagatcgggccactgcactccagcctgggtgacagagcgagactctgtctcaaaaaaaaaaaaaaaagaaaagaaaaaagaaaaaagaaatgcaactcactgagagtctccttaaagatgctgcccactgacagcaagaaaagatcagtggctacattgcctccacctggccttgtggctgcactcctctggcccagaaggggacttatcaggggctagctggacataatcgagatgggggattttccccattaacaaccatgtgtacttctgcaataacccaccctagaagagccttctgctcaaaatgatactgaaacacacatccctggctggagatttgagatgctaatgagatatgtgacgtgtgtaccagcacggaccgtcacagggctttcctgatcagaggacttcctggaacgtgcttactaggaacatccctgcacagccccttcatgaataatcatgtcagattctcacaaaaaggctctgcccaacactagtagggacaggctcattcttttgaggagcccaccctgctccactgttcagggtatctcttctttccgagctcctacgcctttagataaagggcacttacctgcttaactctttctgcgtgtctcttgactgaattcaaggagaccaagaaccagaggacttccacgcccctcctggtaacatctggtgttttcccctggtggcctgtgaactgttcttctgggtaagtgccaaaaagctggtgccagatcctctggttgacgacctctgcttctttctgcactgaagaacctcctgccctaatgcagatcttgcagccttaaggggaggggcttttcctctcgggctctgttcactatcaactgcccagtaccatttcccttcagccactgtcactctgctccctctggctgacttctcagctcaccctgaggggtgacaagcagaggagggaggatttaaactccacagtgagtagatctgagacacggtgaccctccctgcaggaggcttgtgaaggtggcagaaaatccaccctggctgtgcagtgactggggagcttcatatcttcaactaaaactactattccatgttgagtcggctcttctacttgctgttcatggcagttcattctcctggacacaatatgccgccaccggtgaataatcccccaggtcactctgcttactctttgctgtccctgtcctcgtcgccgggcttccttgaattcctccttcgtgtacaagtgccttgtctgtcctgcttgtctgggacctgctgcgtttgcttcactgccaatcgccggaggcctgcccgggcctgtgaggaagtttatacttattttttccctagagatgagacccagcttcgtcctttcagttgcctcctttctcactgcagggaccggcactggcaggatgctcgcttacaggcatccctcgtttactatcgggtccttctccgcccgactactcttcaagaatgcctcattctgtggctcctcaagcgagctgtctggttcctccggatggtcatttataggcctctttctcagaccccagtttctctttacaaccggggtttcctgtgggtcaatgggaagttcttcatccgcctcctcaagccattgttacagacctgtacggcagtcaggtgctttttgtattatgttgaaaaagctgacagaaaatgcccccggcactccccttgctgcttatgtgatcatatcagggacgtaaaaaaccagaatcaacagcccagtccactaactctgagccccaggggccttccatgcctgtttaagcattttttctgtatgatccccaaggaacctactatgaccaggggaagatatcaaatttacctccattcctctaaccatctgtatgcattaatccaatattatcatgcattaaggggaccttaccatggagtcccttctctgcagactttagcaggggcagaactactggacttcttgcagaaccaaggtcactgggaatatgagagacaagagaactactcccatgcccgacgttcttacatgcttcctggcccaacacagaggtgagaaaggcgtccctcctaggcatcaatcctaggaaatctaagaaaggcttctgagcaaaatgagatacagggagacaatggatggtgcaaatgctaaggctagctaattctggagccccagggtgaagaaccaatcatccctgtaaatagaggcatggacacttcacctaggccaaggtgtggaatgcctcaccttcctgaggcacccaataggtggagagatgccttctctatcctatattcattcctgtcttctctttcagatgggtaaccagagctccgtaccccaggattcccctctcggatgcatccttagaaactgggataagtttgatccccaggcattgaaacgaaaaagattggtttttctttgcaatacagtttggccaaaatatgaactagaagggcaggaagcctggccagtggggggaagcttaaatgttaataccatactccagcttgacgtctactgccgacagcagcgcaaatggtcagaggtcccttatgtgcaaaccttcatgatcttgagggaaaaccccgatttttgtaaaggctgcaagatagatcctgcccttttagctatcctcagtcgtccactccagagacctcaaccaggaggcttcaatgatttcctggtcaacccacctcaacctcctcttcctgagaccaaagagaaagagcaagcacccccagctccttcctccttgtatcgcactcttagccttcatgggtcagcctcaacctacactaggccctcaggcccccgctctggaatctgcctgctaccagtggtgagccgaccagtaggaccagtccaagtccaggtccccttttccatgcaggacttgtcccaagttaaggaaggcctgggaaaattctcagagaatccgggaaaattcctggagggcttccgtaaattaaccctcacttttgaactaacctggaaggatgtcgccatcctcctaggacaaaccctgtctctggaagaaagacagaccatctgggaggcagcacgtcaatgcggggatgagctacacttggcagatgccaactaccccgtgggagctacagctgtccccctgcaggaccccaactgggactacgataccccggcaggaatctgcgccagaaatcatatgctcctatgcctgatagagggaatgaaaaggagtcaagtcaagcctgtcaattataataagttagcaaccatcgaccaagggccacatgagaatcccacggcctttctcgaaaggctccaggaaactcttatcaaacataccaacctagacccgggatccccagaaggacaactagtcctaaaggatcacttcctcacacaagctgccccagacattaggagaaaactgcgaatgctggctttgggaactagagcccccatgtcagaaatcctcaaattcgcttcctcagtgttttataaccgagaccaggatgagagggacagggccgagaggaaggaaaaacagaaagaagagaggcaggctcaattactagctgctttgcaagttcaccagccccctccaggttgccctaaggataccttcccagggaactgctatcagtgcgggaagccgggccattggaaggcaaactgcccctacgggccaaggggggaaaagccctgcacggcctgtcccctctgccgtaagctcaggtactggaaagagaactgtcccgagagccaaaagggcccctgagccaatgatggctttgagctgagggtgccctctgccttggccagctcccagatgtgacatcatcatcaaagggatggagcccagggcaactctggatgtagcaggtaggacaatacattttctatttgatttgagagcagcctgctcggtgctgacccccttctctaggcaactttcctctgtcaggtaatcagggtaaatggcatctcttcctaagatttacaccttctttattgttaaaagaccaattaatcttttcccatgagttcctgatactgtctgaatgtcccatacgtctttagggcagggatatactctccaaactaggggcacgcttcacatttacctgaacttccctgaaaggctttctttttttttggaagactcacccatgacattgctgaattatcttgatctggaatcacaaataaccctgagatatgggctttgatacactaggaagggcaataactgcagtcccagtcaaaatccagctaagaaaaccttccacttctttcataagaaacaatactcgctatggccagaggcaacagaaggacttgagcctatcattaacccattccttagacatggcctgttaaagtctgtaactctccctgcaacacaggaaatctattctgctggtagaaaacatttaaagggttctccactactgaaccctgattaagtctggttttctgatggcggcagtttcatccaacatggagtgacacatgcagttatgcaatagtgtctctatttgacattatagaagccaaatcccttcctccaagaacattggcacagctagcagagctcatttccttaactagagccatagaaatagggaaaaacccaaaagctacaatttatacagattcaaaatatgccctctcaggactccatgctcatgtggccatctggaaggaacagggatttttaccagcaaaagatacccctaaggaatgtggaccacagatcctggccctgctctaagctgtacacctatcacaggaaatagctgtagtccatggccagggacaccaaaggaccagggagaaaatgcccagcaaaacaggagggtggatcaaacagccaggaccactaccctgtagggaactcctcatggcccttaacccatctttacccaacaccttacccacccacaaaaacccaagaggaaaaggaatgggctatcaaatatgaatctacccgagaacctgaggtgtggtatacagtgggaggaattctccactttcctaggccctccagtaaaaacttgtgagagcactccatgagtcatgtcactttgggagacatcatctccagcacatgtgcaaaaacctcttttccaggaaagggctctactagactatttgtcaggtctttaacacctgtgcatcctgtgcctgtaatagcccccagggccctacgctgccctgcttttttttttttttttttttttttttgagtcaaagtttcactcttagtacccaggctggagtgcaacggcgtgatctcagctcatcgcaatctctccctcccaagttcaagcgattctcctgcctcagcctcctgagtagctgggattacaggcaggtgccaccaaaaaaagaccaaaaaaaatttttttttttttttggtatttttagtagagatggggtttctccatgctggtcagactggtcttgaactcccaacctcaggtaatccgcctgcctcggcctcccaaagtgctgggattacaggcatgagccaccgtgcccagccaaatttttttttttgttcaatgttgcccaggttggcctcaaacgcgtagccttgcctccttgtgacccaggacaaccggccagagccaatgcagctccctgtcctgcttagttgagccagttcagcattgggaagcttacccagggaaagactgatggatgtatttcactcaattgccagcctgtagaggctataaatgccttctggtgtttgtggacacctttattgggtgggttaaagcctttcctacaagaacagaaaaggcccaggaagtagccaaggtacttcttaaaaaaaaaaaaaaaatcatcccggccgggcgtggtggctcacttctgtaatctcagcactttgggaggccgaggcaggcggatcacgaggtcagagaattgagaccatcctggctaacacagtgaaatcctgtctctactaaaaaagagaaaaaattaggtgggtgtggtagcgggcgcctatagtcccagctactcaggaggctgaggcagaagaatggtgtgaacccgggaggtggagcttgtggtgagctgagattgtgccactgcactccagcctggacaacagagcgagactccgtctcaaaaacaaaaagaaaaaaaaaatcacccctcagtgtgggtttagtttgtgtttacaaagtgacaacggcccagtttttatttcacgcaccctttaattagtgacaaaagccctagaaataaagtactcctagcactcctggagaacacattcctctggcaaggtagaaagcactaatcaaactattaaaaggaccctgaacaaagtgtgccaggaaacctcctcaccatggttagaactcctgtccgtagcactgttctgagcatgacccctaatattacttatgccttcctacatgcagacctaatgttagatccagaagttacccaattaatcaaatacataacatcactggcccaatttcaacaagccatccaggagtttgagcaaaaggtactgcctgccactgacccctccagtaatcaacccttatactagccagggtcacaagtcctcatcaaaacctggagagatgggtcacccaggtctcaactagcctgggtctctcctttatggaaaggcccctttattactttctaccccgacagctatcaaagtttctggaatctctagttggatacatcactcctgagtaaaactgtgagaaggtcccgaagaaccaacaacagaatcagcatctgagtagtctcatgagccagccactggagagcttccaattcctcttcaagtgaaaagataagtaaagccttctctcctttcacctcaaaaaaaggtctctcagtacggggaatcttggttgcggtggcatcggttcttctccttattttgacccacactggcatgccacctgaagtcccgataacagcctgatttctcactaaacactccatcgaaccatttcattatttgtctctcctattttcagcactttccttttgctttcacaaagcttaagggagaatcagctatgacagagaaattccttttcctttatctttccctccttcccatgcccctactctcacaggcacagtggaatgaaaattcccttgtcagtttttccaaaataattgcttcgggaaaccatctaagcaactgttggatctgccacaacttcatcaccaggtcctcatcttaccaatatattttggtaagaaatttttctttaaacctaacatttggttcaggaatccctgaaggccaacataaatctgttccgctccaggtttcgcttgctaactcagcgcaccaagtcccctgcctggatctcactccacctttcaatcaaagctctaaaacttctttctatttctacaactgctcttctctaaaccaaacctgttgtccatgccctgaaggacactgtgacaggaagaacacctctgaggagggattccccagtcccaccatccatcccatgagcttctccccagcaggctgccaccctaacttgactcactggtgtccagctaaacaaatgaacgattatcgagacaagtcaccccaaaaccgctgtgcagcttgggaaggaaaagagctaatcacatggagggttctatatttgcttcccaaggcacacactgtccccacatggccaaaatctactgttcccctgggagggcctctatcccctgcatgcaatcaaactattccagcagggtggaaatcgcagttacacaagtggttcgacagccacatcccccggtgggcctgtacccctcctggctatgtatttttatgtgggccacaaaaaaataaactgccctttgatggaagtcctaagataacttattcaaccccccctgtggcaaacctctacacttgcattaataacatccaacatacgggagaatgtgctgtgggacttttgggaccacgggggataggtgtgaccatttataacaccacccaacccagacagaaaagagctctgggtctaatactggcagggatgggtgcggccataggaatgatcgccccatggggagggttcacttatcatgatgtcaccctcagaaatctctccagacaaatagacaacatagctaagagtaccagagatagcatctctaaactcaaggcctccatagattctctagcaaatgtagtcatgaacaacagattggccttagattacctcttagcagagcagggtggagtctgtgcagtgatcagtaaatcctgttgcatttatgtcaataacagtggggcgatagaggaggatataaaaaagatctatgatgaggttacgtggctccataactttggaaaaggtgattcagcagggtccatttgggaggctgtgaagtctgccctcccctccctcacatggtttgtccctttactgggaccagctgcacttaatagcctgctttctcctctttggcccttgtctctataattcactaattaaatatgtctcttccaggatatggcaatttcacacagagcccctaaaaatggaaagagatcatccaatcttccttggaggtcccagcacctacaagtacatatctcccttggatgccagtgggcaaagattctgcaactacggaggggctccttccctgacagagagcaagagagggagaccctgatgacttcttcgtcccacgtcagcaggaagtagttacagaagacccacgacgtccttatgcccaaagcttttcagggtctccaactcttgagggggaatactgttagggtaggcaggtagccagacaagagcaggcaaggaagcccctgggaaaggaatctttagaaatgcagcccgctgatggcctccttggaaacgctgcacgctgagtcagcaaaaggaggagcgtggctacactggctacacctggccttgtggctgcattcctctgttccagaagggaacttatcaaggcccagccagaggttaccaaggtaggagctattccccactaagaagcatgtatacttctctaataattcaccctaatataccattttgttcattaaaataataaaaaaaaccacacacctgtgtggagattttattttttaaccagaaattccttgttagactttagatccaaatgacatggcacatgtgtgcccagaccagttcccaacacatgcttactagtaacgcccctgcatgaccccttcatgaataatcatgtaaaattctcataagaagcatctccccagccaggtgtggtggctcacgcctgtaatcccaacactttgggaggctgaggcaggcagatcacctgaggtcgggagcgcgagaccagcctgaccaacatggagaaaccccgtctctactaaaaatacaaaattagctgggcgtggtggcgcatgcctgtaatcccagctacttgggaggctgaggcaggagaatcgcttgaacccgggaggcagaggttgtgttgagccaagatcgtgccattccactccagcctgggcaacgagaggggaactccatctcaaaaaacgaacaaacaaaaagaagcgtctccccagcattggtgagacagactcattcatttgagcagcccagcctgttctgtctttcagggtgtactgtttatttaaaagcccccataaaaattcctcccaggccaggcatggtggctcaggcctgtaatccctgcacttccttgggcggatcctcagacagatcacagctcaggagtttgagaccagcctgacaaacatggcgaaaccccgtctctactaaaaatacaaaaaaattagccgggcctggtggcacgcacctgtaatcccagctactcaggaggctgagggaggagaatcacttgaaaccaggaggcggaggttgcagtgagccaagattgcgccactgcactccagcctgggctacaggagactccatctggggagggcggcggggaattcctcctaagtcactagcagctgactcactctctgcagcagccagttctgtctcttcttgacctcctgtctttaaataaaggttacttaacgatttaactctttctgtgtgcctcctagatgaattctttccttcaggaagataaactgaaggacctccacacccctcctggtaacaaaggtctttgtgcaatccctcctgaagaagcaatggaggatttagtatatctaaactagtaaatacaaactgtactcaattatccaagaaatcattgaagaaacactctttactccattttttatatcttgggaaaaatataattaaagacaaaataatatttgccaaacccagaaatcctcaccaaaaaggaaaaaaataaataaacaatcccagttggtggctggtgaatgcttctaccttaatcaatacatgttttgaagctgtcagcttctttttgctcataagtgactccacagaatctagtctttgctttgccctctagacaaggaatacagaatttttaaatcttatcagaaacatataaattgtttggttttgcacaatatttactaattttctccactcatccactgtggagtcatagcacaaaatgaggcaccaccctctcgtattgcaactaaaacagactgagcttctgctccataaccataaacagtaatagcaatactaattgaaagatgaagtaattttacgtaagtaggtataaaactgataattcattgttattttcagttttacaataagtgggaattacatagaataaatctttctctctctctctttctatttctgacagtcccgctctgtcgcacaggccaaagtgccatggggtgacctcagcttactgcaacctccgcttcctgggttcaagtaactcttgtgcctcagtctcctgagtagctgggattgcaggtgtacaccaccttgcttggctaatttttgtatttttcatagagatgaaatttcactatgttggccagagtggtctcaaactcccaacctcagatgatcagcctgccttggtctcccaaggtgctgggattacaggcatgagccaccacacccaacggagttttcactcatttactttaatcatcatgggttagagatatagcttttaaaaatgtaattgaatatacccttacagttaggatctaaaaagagcatttcctctattaatgtttattaaataatatggtggaactcagacttgctctgttgcccaagttggagtgcagtggcatgatcttggctcaatgcaatctctacctcatgggtttaagtgattctcgtgcctcagcctcctgagtagctgggattgcaggcatacaccaccatgcctggctaaattttgtatttttactagagacagggtttcaccatgttgctcaggttagtctcgaactcctggccacaagtgatccacccaccttggcctcccaaagtgctgggattgcaggtgtgagccaccacaccagcttaattttttttctttttcttttcttttcttttcttttttttttgagatggagtttcactcttgttgtccaggctggagtgcagtggcacaatctcagctcactacaacctgcacctcctgggttcaagtgattctcctgcctcagcctcctgagtagctgggattacaggcatgtgccaccatgcctaattttgtatttttagtagagatggggtttctccatgttagttaggctggtcttgaactcccgacctcaggtgatctgcccgtctcagcttcccaaagtgctgggattacaggcgtgagccatcgtgcccagcaattttttctatctgagtttcttccgtactaatcagcttgtgatagacacatggtttctgaaacagaaaagtgcaagggctttttatgagcagggtgtggaagactaccagtaacaaatgctttggcataagtgatgagtgagaaggggagtgagagtctctactgtcctacctactaattgtgctttgggaatttggattgaaaaaagccaccttaatggtgtttggttatcatttattctcccccacctggcaggaaataaggacagggtccccaaagctgctagggcacttagggtggatatgaaacattaaaatatgaaacattaaaacttcacttgcttgaaaccagagcagccaccaaactgctcaaaattactgccaatgatgtcttgcttcctggcattcagaaaccttctccttctctacccctgactcttccttccctctctatcccaatctcaatcaccttaaggaagagctgagtatcctgaaaaatttgaaaggaaaaaagagattcaaacttttgtagctctcttggtaagaggtgccccaatcaccttccgaggagaaatgctttgtaggagtgtctcaaaccaccaagacctgtgggaccaagcacatatggggcccataggaagaagccactgagcctcaggatcctccagatgctgggaggtacatggagcagcaggcagcattatgcttgtatcaagcacccaaggagaaaacaaggccactgagctgccccagccttccctgacatgattgtctcctatggccctgggtttgtttggagacctgcaacataactgtaattcctccttctcctttgtgagttcaaactaagggtaggtttgctaccagtcttttaaaaaagattggtgccactcttgcttacagggcagagaaggcacccagaatggtggccactggcaccccactcccaagccaataccacctctagtgtaaccatgcacacaatctccagaaggggaccccagcccctgacccagctgcattgtctctgccactgtggtgaacacttgcatggaggcaggtactctggcgccctctagcactctggctcttgaggagtcagaggaaaacactggggcccaatacaagtcccctaaagttagagcacacagtccagataagtgctggccccctaaaatcttccagaaatgaagccagtcagctgaatccaccttataccacaatccacaatcaaaccctcaaggtcatcaaatagttatgataaaagtaaaaaacaaaaacaaaaaacaatcctcatccaaaggtcagcaacctcaaagactgaaggtagataagcccaaaaagatgagaaagaatcagtgcaagaaccctggaaactcaaaaagctagagtgccttttttcttccaaacaactgcatcacctttccagcaaggtttctgcaccatgcagagatggcagaaataacagaaatagaactcaaaatgtggataaggacaaagttcattgagctatgggagtatgttgaaacccaatccaagaaagataacaaacacataaaacaatgggattatgtaaagaggccaaatctatgattcactggtgtccctgaaagagagtgaaaccaatttggaaaatatatttttgcatattatccatgagaacttccccaacctagctagagaggccaacattcaaattcaggaaatgcagagaaccccagtaagatacttcacaagaagatcatacccaagccacataatcatcagattctccaaggtcaaaatgaaagaaaaaatgttaaaggaagctagagagaaaggtcaggtcacctacaaaggaaagcccataagagcagacatctcagcagaaagcctacaagctagaagagattgagggccaatatttaacattcttaaagaaaagaaattccaacccacaatttcatagttggccaaagtaagcttcataagcgaaagagaaataagatccttttcagagaagcaaatgctgagggaattcattaccatcagacctgcagtacaagagctcctgaagaaagcattaaatatggaaagaccattaccaaccactacaaaaacacactaaaggacatagatcagttacactataccacctaacaccatgataacggatcaaatccacacatatcaatattaaccttaaatgtaaatgggcagccagctggatgcagtggctcatgcctgtaaccccagcactttgggaggtggaggtgggtggatcatgacattaggagtttcagaccagcctggccaacatggtgaaaccccatctctactaaaaacacaaaaattagctgggcatggtggtgcatgcctatagtcctagctactcaggaggctgaggcaggagaatcgcttcagccccagaggcggaggctgcagtcagctgagattatgccattgcactccagcctgggcaacagagcaagactctgtctcaggaaaaaaaaaaaaaaaagtaaatggcctaaatgccccaattaagagacagactggcaaggtgggtaaagaaccaaaacccactggtatgctgtctccaagagacccatctcacaagcagtgacacacataggcttaaaataaagaaatggacaaaaatccaagtctttgctattgtgaatagtgccacaataaatatacgtgtgcatgtgtctttagagcagcatgatttataatcctttgggtatatacccagtaataggatggctgggtcaaatggtatttctagttatagatccctgaggaatcgccacaccgacttccacaatggttgaactagtttacagtcccaccaacagtgtaaaagtgttcctatttctccacatcctctccagcacctgttgtttcctgactttttaatgatcgccattctaactggtgtgagatggtatctcattgtggttttgattagcatttctctgatggccagtgatgatgagcattttttcatgtgtctgttggctgcataaatgtcttcttttgagaagtgtctgttcatatccttcgcccactttttgatggggttgtctttttcttgtaaatttgtttgagttcattgtagattctggatattagccctttatcagatgagtaggttgcaaaaattttctcccattctgtaggttgtctattcactctgatggtttcttttgctttgcagaagctccttagtttcattagatcccatttgtcaattttggcttttgttgccattgcttttggtgttttagtcatgaagtccttgcccatgcctatgtcctgaatggtattgcctaggttttcttctagggtttttatggttttaggtctagcatgtaagtctttaatccatcttgaattaatttttgtataaggtgtaaggaagggatccagtttcagctttctacatatggctagccagttttcccaacacaaatgtccaacaatgatagactcgattaagaaaacgtggcacatatacaccatggaatactatgcagccataaaaaatgatgagttcatgtcctttgtagggacatggatgaagctggaaaccatcattctcagcaaactattgcaaggacaaaaaaccaaacaccgcatgttctcactcataggtgggaattgaagaatgagaacacatgaacacaggaaggggaacatcacacacccggaactgttgtggggtggggggagggagggatagcattaggagatacacctaatgctaaatgatgagttgatgggtgcagcacaccaacatggcacatgtatacatatgtcacaaacctgcatgttgtgcacgtgtaccctaaaacttaaagtataataataaaaaaaagagaaaaaaaacctgcttattaggaaagcagagtaattatagaatgtaaaattagtgaaaaaatttatgaaattttgcctttataatgatatttaaaataaataccatcatgcctcttttgcaggtaaagaaaatgaaaaactagaatatttaggctcagggtggggtaactttaaaaaagaaggactggtcatgtctatacaatacaatatccttcctcccctaataaactaactcctaaaataaaaaaataaaaaataaataaatggacaaaaatctaccaagaaaatggaaaacagaaaaaaagcagggggccaggtgcaatggctcatggctataatcccaggactttgggagaccgaggcaggaggatcacttgaggccaggagttcaagaccagcttggccaacatggtgaaatgctgtctctactaaaaatacaaaaaattagctgggcatgggggcttgtgcctgtaatcccagctactagggaagctgatgcaggagaattacttgcacaccggaggtggaggttgcagtgaactgagattgcaccactggtctccagcctgggcaacagagcaagactccaactcaaaaagaaaaaaaggaaagaaaaagaaaaaaaaaagcaggggttgcaattctagtttctaacaaaacagactttaaaccaacaaagattctaaaaagacaaggaagggcattacataatggtaaagggttcaatttgacaagaagagctaactatcctgaatacatatgtacgcaacacaggagcaccctgtattcctaatgcaggaacttgctcaaaatgcaggttcttagagactttcaaagagacttacactcccacataataacagtgggagactttaacaccccactggcaatatcagacagatcattcacacagaaaattaacaaaaatattcaggacttgaattcagcactggatcaaatggacctgacagacatctacggaactctctactcaaaaacaatagtatatacattctccccattgtcacatggcacacactcctttttttttttttttttttttttttgagatggagtctcactctgtcccccaggctggagtgcagtggcacgatctcggctcactgcaacctccgcctcccaggtacaagcaattctctgcctcagcctccaaagtagctgggattacaggcacctgccatgatgcccggctaatttttgttatttttagtagagatggggtttcaccatcttggccaaactgctcttgaacttctgacctcatgattcacccacctcagcctcccaaagtgctgggattacaggcgtgagccacggcacctggccggcacacactcttaaatagatcacataattgaaagtaaaatactcctcagcaaatgcaaaataactgaaatcataacaacctctttgatcatagtgcaatcaagtcagaaatcaagactaagaaattcgttcaaaaccatatattacacagaaattgaatcacttgctccagaatgacttttacctctataattgacaattcttgtctcccatcttgctctttcttcttaaatttccttggctattccctccaagatgatgttggataagaggagactagaagctccttagtgtcatttctgactttagtgtgactttctgtaacatgtcccagatgtttgtcaatttgatgaagatatatcacttcctagttcactatttttaggtaacattatttcctgttaaatactgccaattttttttgcatttatgaatgtgggcaccttatttttctctcaacatagagagaccccatctctacaaaaaaatacaaaaatcagccaggcatggtggcacatgcctttggtcccagctattcaggagactgagatgagaggatcatgtgaacctgggagagggaggttgcagtgagtgagtcaagatcatgaacgctgcactccagcctgggtgacagaatgagaccctgcatgaaaaaaaaagactgcatggcattggtggggagtgatatatatatccatggaacagaatagagaatgcacaaatattttcctttcaactgatatttgataaagataccaaagcaggccaggtatggtggctcacgcctgtaatcccagcactttgggaggccgaggcaggcagatcacgaggtcaagaaattgagaccatcctggccaatgtggtgaaaccccgtctctactaaaaatacaaaaattagctgggtgtggtgacacgtgcctgcaatcccagttactcgggaggctgaggcaggagaatcacttgaacccaggagacggaggttgcagtgagccgagatcatgccactgcactccagccaggcggcagtgagactccatctcaaaaaaaaaattaaaaaaaaaaaagataccaaagcaattgaaagcaggactttcaaataatggtgctggaccaaatgaatatccacaatgaaaaaagatcaatctgcacctaaatttgacactcattcaaaaaggaccatgttgtgaaatgcaaaataaagaaaccatcaaatgttaatctatcaagaattagaaaaacatactgtaaactaattgggaacaagcacaccaaagagttcatagatatgacaccaaaagcatggaaaaaaatgataaatgaaacttcgtcaagttaaaacttctggtctgtgataccaatggaacagaacagagaacccagaaataaggccacaaacctgcaactatctgatcttcgatgaagctgacaaaaacaagcaatggagataacactctctacttaataaatgatgctgggataactggctagccacatgtagaagactgaagctggacctcttccttataccacacaaaaaattaagtcaagatgaatcaaagacttaaatgagaaatcccaaactataaaacacatggaagataatctaggcaataccatcctggacatacaaatggacaaagatttcataacgaagacaccaaaagcaattacaacaaaagcaaaaattgacaaatgggatctaattacaccaaagagcttccacatagcaaaagaaactatcgcaatgaatagaaaaccgtacagaatgtgagaaacttttgtgcaaactatgcacctgacgagtctaatatccagcatctatgaggaacttacacaaaattataagaataaaacaaccccattaaaaagtgggcaaaggacatgaacatttttcaaaagaagacatatggcccagctcaatggctcaaacctataatcccagcactttgggaggccaatcctggtggatcacctgaggtcaggagttccagaccagcttggccaacatggtgaaaccccgtctctactaaaaatacaaaaattagccacgcgtggtggctcacgcctgtaatcccagccactcgggaggaagaggcaggagaattgcttgaacccgagagaggcggtggttgcagtgagccaagatcgtgccactgcactccagcctgggcaacagagtgagactatgtctccaaaaaaaaaaaagacagaaaaaagaaacaacccagagcacaggaaaagggaagacgcctgtgtggctggaacagacggagtgagcgctcactagcaggagataaggtcagagatgtcctggggaagcagatcagatagggacaaggtcttcaaacaactctctcccacaccacaaaagaaattggaaatgatttatttcctcacctgttttaagtaaacatttaacttttttctttctcgtagaagagaaagtgatcaactgtaccacatactaccaaaaggaagagaaagatgaggacaggaagttaaatattgcatttaaaaatggggaggttctctgggcgcagtggctcacatctgtaatcccagctctcagggaggcagaggcgagaggatagctagagcccaggagttcgagacccgcctgggcaatatagcaagaccccgttgttctccacaaaaagcaaaaaaaaaaaaaagacaaaaaaaagtgtaggccaggtgtggcgactcacgcttgtaatcccagcactttgggaggccaaggcgggcagatcatgaggtcaagagatcgagaccgtcctggcaaacatggtgaaaccccacctctactgaaaatacaaaaattagttgggcgtggtgcgcgtgcctgtagttccagctactcaggaggctgaggcaggagaattgcttgaacctgggaggcggaggttgcagtgaaccgagatgcaccactgcactcccgcctgcgcgacagagcaactctcaaaaaacaaaaaaaaaaaagtgtaaaaatggggaggttggctgggctcagtgactcacacctgtaatcccagtactttgggaggccaaagtgggcaaatcacaatcaccttaggtcaggagtttgagaccagcctggctaacatggtgaagccccgcctctactaaaaatacaaaaattagctgggtgtggtggtgcatgcctgtaatcccagctactcaggaggctgacgctggagaattgcttgaatccgggaggcggagtttgcagtgagcagagatcatgccactgcactccagcctggatgacagagtgagactccgtctcaaaaaaaaaaaaaaaaaagaaagaaagaaatgggaagtcactgatgattgaaaaagaagggatcagttgaatgctggaagtgaatgtttgattcaagcaagaattcaagggttcaagtaaaagttggaggcaagacttgaagagaaagtaaaagcaagctttcagagtatgacattctttctttctttcttttcttttttttttttttttgagatggagttttactcttgttgcccaggctggagtgcaatggtgcaatctcagctcactgcaacctccacctcccaggttcaagcaattctcccgcctcagcctcccaatagctgtgattacaggcatgtgccaccacgcctggcaaatttttgtatttttagtagacacagggtttcaccatgttggccagtctggtttcaaactcctgatctcaggtgatccacccgccttagcctcccaaagtgctgagattacaggcgtaaaccactgtgcctggccacgagtatgacattctcaaaggggctcagaagaggggaattaccatagagggaaatatagttaccactaatttttgttttaaagatggtgaagggggcctgcccctccacacctgtgggtatttctcgcaaggtggagatgagagactgagaaaagaaataagacacggagccttgggcccaggggaccggcgctcagcatacgaaggacccgcaccggcactggtctctgagttccctcagtatttattgatcactatctctactatctcagcaagggggatgtggcaggactataaggtaatggtggggagagggtcagcaggaaaacatgtgagcaaaggactctgtgtcataaataagtttaaggaaaggtgctgtgcctcaatgtgcatgtagaccagatttatgtttgactttacacaagcatctcagtgcagtaaagagcagtattgcccccagcatgtctcacctccagccataaggcagttttctcctatctcagcaaatagaatgtatgatcaggttttacaccgagacattccattcccagggatgagcaggagacagatgctttcctcttatctcaactgcaaagaggccgtcctctttcactaatcctcctcagcacataccctttacgggtgttgggctgggggatggtcaggtctttcccttcccatgaggccatatctcaggctatgtcagtgggggggaaaccttggacaatgcccaggctttctcaggcagaggtccctgcggccttccgcagtgcattgtgtccccgggtactcgagactggagaatggtgatgacttttaccaagcatactgcctgcaaacacattttaacaaagcacatcctgcacagccctaaatccattaaatcttgagtcaacacagcatatgtttctgcgagcacagggttggagctagggttacagattaacagcatctcaaggcagaagaatttttcttagaacagatcaaaatggagtttcttatgttttcctttttctacatagacaaagtaacagtctgacctatctttcttcccccaacaagatgggcgagcagaagggaaaaaatggctttattctgtatgtgtgcatgtgtgtttatgtgtcttttaaaggagaagaccatcattggagtatgctgatgaaaataattcccttgagcctggcgcggtggctcatgcctgtaatcccagcactttgggaggccaaggcaggtggatcacgaggtcaggagttcgagaccaggctgaccaacatggtgaaactccatctctactaaaaatacaaaaattagccgggcttggtggcacgtgcctgtaatctcagctactcaggaggctggggcaggagaatcgcttgaacccgggaggtggaggttgcagtgagctgagatcgtgccactgcactccagcctgggcaactgagcaagactccatctcaaaaaaaaaaaaaaaatcagagcttagtcttcacttgtgaaatagatttgtgaagggagcacctgcatccttggagagctctgtgattgatcttctctgtatgccagatcttacaatgggaaccagtcactcaattgaaaaacttaaatgcagtgggaataactggatcttaaggaggtagggaccaactagcgagacttatggcccctcaatttccagacttgagccagtttacagacccaggatcccttgaatgaaagggaagctggatttccttaagaaaagatctcactgcacgacaatttatactgtcaatctttctcccatcctttgccaaggagaccgctggccttttaccagggtaaatatgcattgaggaaagtggaatgatcagaccttttggggactagtggacccggctctgagctaacattgattccaggggacccaaaacatcattttggtcctcagttacagtaggggtttatgggagatcagataattaatggagttttagctcaggtctgatttacagtgagtccagtgtgtccccagactcatcctgtggtcatttccccggtgccaaaatgcataaatggaatagacatacttagcagcaggcagaatccccgcattagcttgctgactagtagagtgagggctattatggtgggaaaggccaaacggaagccactagagctgcctccatctagaagaattgcaaataaaaaacatcacaggccaggtacagtggctcacacctataatcccatcactttgggaggttgaggctggtggatcacgaggtcaggagtttaagaccagcctgaccaatatggtgaaactccgtatctactaaaaatataaaaatacaggctgggcgcggtggctcacgcatgtaatcccagcactttgggaggccaaggtggtcagatcacgagatcaggagttggagaccagctccaacagtaaaaccccatctctactaaaaatacaaaaattagctgggcatggtgtcatgtgcctgtgatcccagctgctcaaaaggcagaggcaggagaatcgcttgaatctgggaggtcaaagttggagtgagctgagacggcgccaatgcattccagcctcggcgacagagcaagactccgtctcaaaaaaaaaaaaaaagacaaaaaaaccccacaaaagttagctgggcgtggtggcgcacacctgtagtcccaactacttgggaggctgaggcaggagaatcgcttgaacccaggaggtggaggttgcagtgagctgagatcgcgctgcactccagcctgggcgttaaagcaagactccatctcaaaaacgaacaaaaacaacaacatcatgtctctggacttgaaagatccaggggtggtgattcccaccacatctccactcagctctcttatttggcctgtgcagaaggcaggtggatcttggagaatgacagtggattatcataagctcaaccaagtggtgcctccaatggcagctgctgtaccagatgtggtttcactgctcgagcacattaccacatctcctggtaactggtatgcagccactgatttggctaactgcttttttttccttccattcctgtccataaggcccactagaaggaatctgccttcagctggcaagaccagcaatataccttccctgtcctgccttggaggaatacgggctctccagctttatgtcataatcttgctcacagagatcttgatcagttcgctttcataagatatcacactgctcctttacattgatgacgttatgctgagtgggcccagtgagcaacaagtagcaaccacactgaatttattggtgagacatttgtatgccaggggatgagaaataaatctgggtaaaattcaggattctttcgcctcagtgaaatttctaggggtccggtggtgtggggccggtcaagatatttttcttttctttttttttttttttaaatggagttttgctcttgttgcccaggctggagtgcaatgactcgatctcggctcactgcaacctctgcctcccaggttcaagcaattctcctgcctcagcctcctgagtagctgggattacaggcattcgccaccatacccggctaactttttgtatttttagtagagacggggtttcaccatgttggtcagactggccttgaactcctgacttcaggtgatccgcccgcctcggcctcccaaagtgctgggattacaggcatgagccactgcgtccggccaagatcttccttctaaggtgaacgataagttgctgcatttggcccttcctacaacaaagaaagaggcataacgcctagtgggcctgtttggatttggagacaacacatttctcatttgggtgtgttactccagcccatttatcaagtgatccaaaaggctgccaatgttgagtgtggtccagaacagaagactccacaacagctccaagctgttgtgcaagctgctctgccactgggccatatgacccagcagatccaatggtacttgaagtgtcagtggcagataggcatgctgtttggagcctttgtcaggcccctaaaggtgaatcatagtggggcctctgggattttggagcaagggcctaccatcctctgcagataactactcaccttttgaaagacagctcccagcctgttgctgggccttggtagaaactgaatatttgactatgggtcaccaagttacaatgagacctgatctgcctatcatgaactgggtattttctgattcatggagccataaagctgtgcatgcccagcagcattccatcatcaaatggaaatggtatatatgtgattgggctcaagcagttcctgaaggcacaaggaagttacatgagaaagtggctcaaatggccaggcatggtggctcacacctacaatcccagcactttgggaggccaaggtgggcggattgcttgaggtcaggggttcgagaccagcttggtcaacaaggcaaaaccccatctctactaaaaatacaaaaattagccgggtgtggtggtgcatgcctgtaatcccagctactcaggaggctgaggcaggagaatcgcttgaacccgggaggtggaggttgcagtgaactgagattgtgccactgcactccagcctgggtgacagaatgagactccatctcaaaaaaaaaaaaaaaaaaaaaagagaaagtggctcaaatgcctatggtctctactcctgccatcctgccttctctccctcagcctgcatcaacatcctcatggggagttccctatgatcagttaacagagcaaaagaagactagggcccagtttacagatggttctgcatgatatgcagttaccacctgaaagtagacagctgcagcaccttctaggacatccctgaagaatagtggtgaagggaaatcttcccagtgggcagaactttgagcagcacagctggttgtgcacttcggtttgaaggagaaatggccagatgtgtgattctatactgactcatgagttgtagctaatggtttggctggatggtcagggacttggaagaagcatgattggaaaattggtggcagaaaaatctggagaacttccatccaaatgttgatggacccgagtggtcaaaaacagtgaagatatttgtgtcccacatgaatgttcaccaaaggatgacctcagcagaggaggattttaataatgaaatggataggataactcattctgtggataccactcagcctctttccccagccactcctgtcatcacccaatgggctcatgaacaaagtggccatggtagcagggatggaggttacacatgggctcagcaatatggacttccattcaccaaggctgacctggctatggccaccgctgagtgcccaatttgccaggagcagagaccaacactgagccctcaatatggcaccattccttgggagtgatcagccaggtacttggtggcaggtcttccatcatggaaagggcagcagtttgtccttgctggaatagacacttaggccagatatggatttgcctttcctgtgattctcccacctcggtctcccaagtagtagctgagattataggcgtgcattaccacgcccagctaatttttgttttttctctgtttttttgagacggattctcgctctgtcacccaggctggagtgcagtggtgtgatctcagctcactgcaagctccacctcctgggatgacaccattctcctgcctcagcctcccgagtagctgggactacaggtgcccaccaccacgcctggctaattttttgtatttttagtagagatggggtttcaccgtgttagccagatggtctcgatctcctgatcttgtgatctgcccgcctcggcctcccaaagtgctgaatttttgtattttcagtagagatggggtttcaccatgttggcaaggctgatcttgaactcctgaccccaggtgatccgcccgcctcggccttccaaagtgctgggattacaggtgtgagccacagcgcccagctgactgctgaacttttttttttttttttttgaaatggagttcacctttgttgcccaggttggagtgcagtggcacgatctcggctcaccacaacctctgcctcccaggttcaagtgattctcctgcctcagcctcccaagtagctgggattacaggcatgcaccaccacacctggctaattttgtatttttagtagagaaggggtttctccatgttggtcaggctggtctcgaactcccgacctcaggtgatctgctcactttggcctcccaaagtgctgggaataatgagccaccaagcccagccccaagaaaaaaagttttttttttcaaagctgaagcctggaagaacatataggtgactaaaaattagacaaaaagaaaaaaaaaaaaacagaaaaaaagtcaatgtagtacaccgcactgacaaagtgaaggacaaaaatcacgtgatcagctcaattgatgcataaaaagtatttgagaaaatccaatactgttcatgattttaaaaaaccatttaaactagaaagagaagaaaataccagaacatgagatttagctgtgatttcttggatacaatatgaaaagcactggcagaaaagcaaaaacagatgaaaggaactacatctaaatgaaaaacttctgtgcatcaaaagagaatgctccagcaaggatgtagaagagcgagctcctgtttcccaacacaaaagtaaaatctcaaaacttgcaggttaaaatatcacaataaaacattcactgaaaaacatgttttaaatctcatatcgatgtataaatacgttactataaatcttgtgctgactcttgccatgaactgagaatggtggttctccactgagcacgaggaaggaagcggaacagaaaagacgatgtgttacatcttagtgcctaagctataagtttggagttttactataaaacattcaccatgtgatgttcaaaataaaatagaatatttaataattattgggttaaaaaaatggttcaattctctccaatggcaaagaagctgtgattcactgtatgagcacagtgataaccattctcacctaaaacacagttcacaggggttcctccaggaatacaacatctctgttctggtctgtctgaaaatagtttaatgtatctcctgctgtttgacatttatgttgacttcatatattaaaatgtgaggaatgaaaaaatcctatcactgatgtttccatctaaactttccattccattcccagtcattaagagtttgaactcagaaacacagtgactcacttgttcagttccaaatataataaaaacgaggcaggaaagatttccccatagtgttctcattttaaagcattcaacaggaacttgtgcatattaatacctgacgtcatgggcaacttcttgaatcctggtctacaaagaggtggcatacatccaaatgtggctcctaaacaatccctgctccccagaagcactgaaaccacaaggcccacaccccatctccaatccatgtctgggtgtcagcccttccaaggaccatgcccagcagagcctcttcagaagttcatgtcactaggtcatgcaggatggaatctaagtgagatgagagggactgagggaaggcatgcgtgagtgagcaaacatgtcaggcaggatgtttcaaagatttgcaatgacattttgttacagtaggtagcttacctggtatgagaaggagagggctccccctccccattcacacacatcaggaatgagccaggcaaccatcaggtgatggtcaggtggttgttaactgtctctctaaaataataattagtcacagccggcaccagggaaaggcatagatagaaaacacctgaaactggtgatcagcctcttcccatgagatctcaggagttgggcgagtggactaaagcatgtgcatgtggacagcccaccccaaggcaagaacagcccaccccaaggaagcaagaccccggaagtatgccaacgtataaaaccctaagtcaaaaggtcaaactgcacacttgcctttcaagtcgatcacttggccctcttccaagtgtactttccttcctttcagttctgctctaaagctttttctttttttttgagtcaaagtctcactttgtcgcccaggctggagtgcagtggtgtgatctcggctcaccacaacctccacctccagggttcaagtgattctcctgcctcagcctcccgagtagctgggactacaggcgtgcaccagtaggctcggctaatttttgtatttttagtagagacggggtttccccatcttagccaggctggtattgagctcctgacctcaggtgatccgcctgccccggcctccgaaagtgctgagattacaggcatgagccaccacacccagaaaaaaatttaaaatttaatatgtgttatattataaacagagaaatcaatatgtcacaatttaatcaactcatccaatcaacacccccaaccttgttcattattctgtgtttccctcccttattccgtacatatctctcattctcatcttctctaactcttgggttcttttctgtttccccctgggtttctgctcctcattttgagcctctctcctctcttgctgtttctccgcttcttcctgctattccatcttttccacctgttctgctccagtcttacaacttgtttcacctcctgtccctctttctccccaatcactggattgtccccagtgtccatacatttctgcctctgtctttccccatctctgcttcccctgttaaattccctcttccctgtttacacccccttgtcctcagtctctagcaccctcagatccctaggcttacactgaggtctatgatccattctgagttaatttatgcacaaaacgtgaggtttttgtctggatttttttcttttttgcatttggatgtccagttgttccagcaccaaaactcaaacagaaacacacaatctgaacaggcctatagcttttaatgaatttgaaccaataatccctgagcaccctgctgtggttcttcttctgctctccttgtcaccagttgccccttcttgctgtcccagcaccacgctgctgcctgccgtggctccaaatccctcctcctctccctcactctctgtctgaggagcctcccctctgctgcccctctccctaccttgctgtccttcacctttctggacatggagcttttctctacatttctccagttgtttccccatcctgttactttctcagcttcttctttgactcttcctgtctcttcgcgaatcccccacgcatcctccattttgccatctgtttatgggtttccctcattctctgtctcagtttgtctacttctctcgcagtccctgtttccagatccccttggcccacacattcacaggagggtttagggtaagacacctgcatcccgcaggagcacatttttccagggggtggagctgggaaggcaagaacaccaggtgtcacaggacaggccctgggcacctccctaacgcgggctcaggggaagcggggactgcaaacgagaggcctggggagcagcagggcccagcaagagttggagggaggtgggggcgaaggcgccttaggataggggtggggtctgcaggatcccgccaggcagaggacgcagcctccctgggactggggctgcggggccgacgagggcgaggctgggaggcgcccaggacgcgactccacctcgcgggtgaggacttgaaaaagtgcggggcaggatgaggggtcagtacagggtttcgaacggaaaaatttaaggaaagaacatgtctacatgacctgaaggcagaaacaccggcgacggaaccagcctcagaatgattttaccccaaatcactgaaacgaccccaagagtctcatagcgatgtgtgacttactagcagtgaggggagcggtatgagaattttcaggcgtgtacgaacctccaaatccggggtatggaggtgagaggactgcgaagcccaagtttaatcttaataatagacagagggaaatccacgcgccgccataccaggttcactccgcgcgatctgtttccgggtctgcaggaaactaagcgcagagcggaatcctgggcgggtcccgcgagcgacggcgtcgggagggaagaaggaagggggcggggcctccgcggagtgggggggcctatgctttcctcttctggctcccatggcatctctatttttcgggtttaggaggcaacatttaccagtgaggctgaagcaactcagcaggatctccctggggcagggcaaaccgttggtgattggatccaggaaaattcctgctattgaaaaagtttagcaacttaatttaaaagccccagaattgtctgtgaaggggatgcaaactggaacgtgaaaggcaaactctgcatggggggatggatcaatcccatgctgatgtcccacaaaacaaaatagaaatccttttattttttatttatttatttttttgagactgagtcttgctctgtcacccaggctggagtgcagtggtgcgatctcggctcactgcaagctctgcctcctgggttcacgccattttcctgcctcagcctcccaagtagctggaactacaggcgcccgccaccacacccggctaatgttttgtatttttagtagagatggggtttcaccgtgttagacaggatggtctcgatctcctgacctcgtgatctgcctgcctcagcctcccaaagtgctgggattacaggcgtgatccaccgcacctggccctagaaatccttttattttctaatctccatttactccagagagtcaaccttgtacttgtttccaaagactgactttgttttttttttttttttggaaacgtagtttcaaatctgtcagccttggcttcccaaagtgctgggattacaggcgtgagccactgggcctggcctccagagactttcatagacgcaacacctggggtgttaagcatggaaagctaggtctgtcatcaccctggattcatcttgtctctgcccagaagagacagtgcactgaaaacaggagagttttgcagcaaagagtttaattatcgcagggctagccaagtggaacaagttgggagagggggaagttagttctcaaatctgtcgcccgaaaagttgggagactagggttttgaggataattcggagagcaaggggctagggaattggtgtggctcattagttgtggagaaaatcataagagggttcaaaacaggcctcctggagctgagtcagtttctgggtgacggtcacaggaccgggcagtgccagttctctggtaccagtgaagaagacgtccaggtggcctgaatgactctgcccaattgtaaaagtctgaaaaatacctcaaagaccaatcttaggttttcacaatagtagtgttatctacaggagcaactgagaaattacaaatcactggttattgtttctgtctacattttagcagaattcagttacctcccataatcctaacatttagcctttcattagtcttagaaagttggtttcagtcacctgagagggtcactttgggagggactagtatcatcctttcttcaaagtcataactataaactgaattccacccatagttagctgggccaatgcccagtaatgagcaaacacagcttgtgaggttagaagcaacaattaggttagatttctctcactatcatgatttttgcaaaggtggtttcaggttcagtgatgttagatcaccgatttttgctttaaataataagcaatggccgggtgcagtggctcatgcctgtaatcccagcactttgggaggctgaggcaggtgggtcacctgaagtcaggagttcaagaccagcctggccaacatggcaaaaccctgtctctactaaaaatacaaaaagtagccgggtgtggtggtgcatgcctgtaatctcagctacttgggaggctgaggcagaagaatcacttgaacctgggaggcggaggttgcagtgagccaaggttgtgacattgtactccagccttggcgacaagatcgaaacttccttgaagaaaaacaaaacaaaacaaaaacctaaaacatctgatgggagaaagaacgcacaaataataacacaaaacccccaaacaatatgattactgagtgctctaatggtaaggagaaatttaaaccagctggttattaatcttaactttagccaagacagaaccccaaattcacctacatacctaggaatgggtataccatcctaggaggaggaaaaaaactgaaattcaccttcccaattggaagcgagcttaaactttagaaaggagttacctgccttctactgtcatggaagcaggaaaacgtgccttccttattggaagcaagtaaaactccagaaaaagatgtacagcaaaataaagttaagatctcaaccaaattttgatagatcagggattctctagagagggagctcccaggcctcagccaattgtcctactggtttgagccataaggatagctcaatctggtaccaagcaccaataggagatcgtcaaaggtcagggcccactctactcagagttacttccttgggtcaccaatttgtcaacgaagagtacctgagacaggtctcaatcaatttagaaagtttatattgccaaggttaacaacatgcctgtgacacagcctcaggaaatcctgatgacatgtgcccaaggtagtctaagtacagtttggttttacacattttagggagacatgagacattaatcaatatatgaaagatgtgggccaggcgcagtggctcatgcctgtgatcccaacaatttggaggccaaggtgggcggatcacaacgtcaggagttggagaccagcctggccaacatggtgaaagcctgtctgtactaaaaatacaaaaattagcctggtgtggtggcacgtgtctgtaatctcagctactcgggaggctgaggcaggagaattgcttgaacctgagaggtggaggttgcagtgagctgagatagggccattgcactccagcctgggcgacagagtgagactctgtctcaaatttaaaaaataaaataaaatagaaatatatgaaagatgtccatcgacttggtctggaaagtcacacaactcaatcagggaggaagcttctaggtcataggtagataacagacaaactgttgcattcttttggagtttcagattaggctttcactgaattcgtgatttacaggaatagtcacttatgccttagtctggcttagtgaaacaataggacaaaggaaaaaatcagatacgcatttgtctcatgtgagcagagggatgacactgagttctgtctgtcctttgtccacaaggaatttccttgtaggtaaattttgaggaaggtatgtagcttttaaaaatctttgtagctatcttatttaggaataaggaataaaatgggaggcatatttgcctgacagagttcccagcttgacttttcccttggctaagtgattttggggtctgagatttattttcctattacacctccttgtaatatcattataagagaaatgcaaattaatatggatttttttcaaataagttaaagtaggaactactttgtgtgtgtgtgtgtatgtgtgtgtgacagaatctcattctgtcacccagactggagtgcaatggcatgatcattgctcattgcagcctcaggtgatcctcccacctcagcctcctggtagctgagactacaggcatgtaccatcatgcctggctaatttttgtattgcttgtaaagacaggattttgccatgttgcccaggccagtcgcaaactcctggtctcaagtgatcctcccacctcagcctgccaaaatgccaggattacaggcatgaaccacttagcccatccaggaagtactttcatctcttgagtatatattatagcctgtgtcacacacaaaaaagagaatgtacatattctaacacagatggaacaatgaaaatgtttactactgtcaaagaacaaatttggacattggttagaagagattctattcaaaaagtatattgtggtagggagaatgctccaaccacaagatctgcaaatgtttgagtcacaagaaatgggcttttcttttctctaaagaaggaagcaaggctagaaagcaccaggtacagggcaggggatgagcatctgctgtgacctattcagggaattttttttttttttttttttttgagacagaatctcattctgttgcccaggctggagtgcagtggtgcaatctcggctcactgcaagctccgcctcctgggttcacgccatcctcctgcctcagcctcccgagtagctgggactacaggcgcatgccaccacgcccagctaattttttgtatttgtagtagagacagggtttcaccgtgttagccaggatggtttcgatctcctgacctcgtgatctgcccgcctcagcctcccaaagtgctgggattacaggcgtgagccaccacgcccggcccaaacaaagattttaaaaaataataaatacatgtgttctacttgaaaaacagaactaaaagtaataagaacaatagcaaactttgctccttacctcagtttttgaatgacattgaagggtcctcaatgtgcatttcggctgtgtggtattcatttcgatcacatgcaagacactgatcagttcttgttggaagatatggctctacatttctaacttcaagggtctctgtaactgtcgaattaagcagaaagctagggtcatattaagaaaaatagtgttcccttatacatttttctgctgatcatgggaaaacatattctcacagcttcatgaattatttggtcacaatttgacaataaaaacactaatttatatgtcagatccatgtcacattctcatattaatctaaattttcttttttttttttttgagacagagtcttgctgcattgcccaggctggagtgcagtggcgcgatctcggctcactgcaagctccgcctcccaggttcacgccattctcctgcctcagcctcccgagtagctgggactacaggcgcctgccacctcgcccggctaattttttgtatatttagtagagacagggtttcaccgtgttagccaggatggtctcgatctcctgacctcgtgatccacccacattggcctcccaaagtgctgggattacaggcatgcgcccgacctcaatctaaattttcttgacatcctttttggtaccagctgagccctgacaaaggaaggtaattcagagacattttctcttgtgatcagagaaataacctaatgagaataaacttatgttgattgggtttttttgttttttgtttgtttttgagacagggtctcactctgtcccctaggctggagtgcagtggcatgatcacagctcactgtaccctccacctcctgggctcaagccatcctcccagctcagcctcctcaatagctgggactagagggtcacgacactatgcccagctaatttttttgtattttttgtagacatagggttttgtcacgttgcccaggctggtcccaaacttctgaactcaagtgatccgcctgtgtcagcctcccagtgtgttgggattacaggtgtgcaccaccatgcccagctgaaaataaaattaaggtgaagaaagttgttctctgtgatctcaggggaaaaccttcaggtaaatttgcattcagattgaatagaagaaacatacaaatgtggatgaactagatactactttaaaagtctttctagcgccaggctcagtggctcatgcctgtaatcccatcactttaggaggctgaggcaggcagatcatgaggtcaggagatcaaggccatcctggccaaagtggtgaaaccccatctctactaaaaatacaaaaactagctgggcgtggtggcatgtggctataatcccagctactcgggagggtgaggcaggagaatcgcttgaaccagggagctggaggttgcagtgagccgagatcacgccactgcactccagcctgggtgacagagtgagacacctttacaaaaaataaataaataaagtatttctgtccacaaaccagcttggagtaggtaggtagccaggcatgagcagttaaaggagcccctgggaaaggaatcttaagaaacacagcccactgacaatccccttttgacagcaaaagcaggacagtggctacattgcctacacctgtccttgtggctggacttgtctggcccaggaagggagttatctggccctagccagaaataacccagctaggggattttccctattaaggagcgtgcacactcctctaataattcatcctagaatggccttttgctcattataatactaagaaacacatccccttttttcaaatatgattttagaaaaaaataaataagggctgggtgcggtggctcatgcctgtaatcccagcactttgggaggccgaggcaggtggatcacgaggtcaggagatccagaccatcctggctaacacggtgaaatcccgtctctactaaaaatacaaaaaaaaaattagctgggcgtggtggcaggcacctgtggtcccagctactcaggaggctgaggcaggagaatggcgtgaacccgggaggcggagcttgcagtgagccgagatagcgccaccgcactccagcctgggcgacagagtgagactccgtctcaaaaaaaaaaaaaaaaaagccacacccctgggtggagatttgagatgctaaggagatatgtgatgtgtgcatggacagtcacagcacattcctgcccaaatgacttcccagaacatgcttactaataatggctgtgcacggccccttcatgaataatcatgtcaggttctcattaaaagggtcaggccagcataagtaaggacagactccttcttttcaggagcccactcggttctgtcgttcagggtgtcgcttctttctgagctcctgtctctttaaatgaagggcatttaccctttaactctttctgcgcatctcttgactgaatccaagaagaccaagaaccagaggacttccacacccctctgggtaacatctggtgttttcacctggttacctggttacctcgcctggttatccaggtaagtaccaaaaagctggtgccagattctctggttgacgacctctgcttctttctgcactgaagaacctcctgccctaatgcagatctggcagctttaaggggaggggtttttcctctcaggctctgttcactaacgactgcccagtaccatttcccttcagccactgtcactctgctccctctggctgatttctcagctcaccctgaggggtgataagcagaggagggaggatttaaactccacagtgagtagatctgagacacatggtgacccttcttgcaggaggcttgtgaaggtggcagggaatacgcctggctgtgcagtgactggggagcttcatatttttttttgtgggggggaggacagagtctcactctgtcgcccaggctggagcgcagtggtgtgatctcggctcactgcaacctccacctcccgggttcaagcgattcttctgcctcagcctcccgagtagcagggactacaggcgtgtgccaccatgcccggctaatttttgtatttttagtagagacagagtttcaccatattggccaggctggtctcgaactcctgacctcgtgatccgcccacctcggcctcccaaactgctgggattacgggcgtgagccactgcgaccggcgcatatcttttaattaaaactacaatccggtgttaagtcagctcttatacttgccattcatggccgttcactcccctgaacaccatatgcccccaccgttgattaatctcccaggtcactctgcttactctttgctgtccctctcctcgccgcagggatttcatgaattcttcctgcgggtgcaagcctcttgcagggcctgtttatccaggacctgctgcgtttgcttcactcaggcgccagagtcctttgagggcctatgctgatgtttatacttttttcctcagaaatgagactcagctttgtcctttcccttgcctcctgtttcactggagggaccggcactgggaggatgcctgcttaaagaaatccctcattttggccgggcacggtggctcatgcctgtaatctcagcactctgagaggttgaggggggtggatcacctgagggcaggagttcaagaccagcctggccaacatggtgaaaccccatctctactaaatatacaaaaattagccgggcgtggtggcacacgcttgtaatcccagctacttgggaggctgaggcaggagaatcgcttgaacccgggagctggccattgcagtgggccgagatcgcaccattgcactccagcctgggcaacaagagcgaaactctgtctgaaaaaaaaaaagaaagaaagaaatccctcacttattattgggtccttctccgcctgcctactcttcaagaatgcctcattctgtgactcctcaatggaactgcctggctcttccagagggtcacctgtgaccacttccttactccctagtttctctgtacaaccagggtttccaatgggccacaggagactgctttctccacctcattaggccattgtaacagacccgtgaagtactcaggtcctttttgctttttgttgaataagctgatagaaaatgcttctcacattccccttgctgtttatgtgatcatataatggactaaaaaaccagaatcaacagcccagttcactaactctgagccccagggggtcttctatgcttttcaagcatttttttctgtataaaccccaaggaaccttttaagagtgggggaagatatcacatcttttccgttcctgtaatcattagtattagcccaatatcattatgtattaagaagacctaggctgggcgcattggctcacgtttgtaatcccagcactttcggaggccaaggcgggcgtgtcacccgaggttgtgagttcgagaccagcctgatcaacatggagaaaccccgtatcggctgggcacggtggctgatgcctataatcccagcactttgggaggctgaggcgggcagatcacgaggtcgggagtttgagaccagcctggccaatatggtggaaccctgtctctactaaaaaattagccgggcctggtggcatggatctgttatcccagctattcaggcggctgaggcagaagaatctcttgaaccctggacacagaggttgcagtgagctgagatcgtgccactgcactccagcctgggtgacaaagtgagactccatgtcaaaaaaaaaaagaaaccccgtctctactaaaaatacaaaaatagctgggcatggtggtggacaccagtaatcccagctactcaggaggctgaggcagaagaatcgcttgaacccaggaggcggaggttaccgtgagccaagatagcgccactgcactccagcctgggcaacaagagagaaactgtctcaaaaaaaaggactttagaagtcccttctctgcagaattcagcaggggcacaactactgggcttcctgcagaaccaaggtcactgggaacatgagagaagagaagagaactactctcatggcagacattcttccacccgtccttacccaacacggaagagtggaaggcatcactgctgggcatcaatcccaggaaatctaagaaatccttctgagcaaaacaataggaagaaatgcaaacagcagagcacacagtagggctaattccagagctccaaggtgaaggacacttcacccttgcagggagaggcatgagacacctcatttaggtcaaggattggaatgcctgaccttcatgagtcaccaaataggtaaagggacacttcctctatcctgcattctctcttgtcttgtctttcagatgggtaatcagatctttatatcccaggattcccctcctggatccccttggaatctgggaaaaggttgatccccagattgtaaaacaagagactgattttcctttgcaatatagtttggtcaaaggtggggagcttaaatgttaataccatattccagcttgacctttactgccaacaccaacacaaatggtcagaagtcccttatgtgaaaatcttcatgatctcgtgggaaaaccctgatttttgtaaaggctgcaaaacgggctcaaaagaaaaagaaaaggaaaggaaacagccaagggcggtggctcacgcctgtaatcctagcactttgggaggccaaggtgggctgatcacctgtcaggtaaccaggtggccaggtgaccaggctggtcaggagtttgagaccagcctggccaacatggtgaaaccccatctctactaaaaatacaaaaaaattagccgggcatggtggcggtcacctgtaatctcagctactcgagaggctgaggcaggagaatcacttgaaccccaggaggcggaggttgcagtgagctgagatcgcaccattgcactccagcctgggagacaagagcaatactacatctcaaaaaaacaaacaaaaaaaaggccagccacagtggctcatgcctgtaatcccagtactttgagaggctgaagcaggtagatcatctgaggtcaggagttcaagaccagcctgaccaatgtggagaaaccttgtctactaaaaatacaaaattagctgggcatgctggtacatgcctgtaatcccagctactcgggaggcttaggcaggtgaatcacttgaacctgggaggcggaggttgcggtgagccgagatcccgccattgcactccagcctgggcgacaagagcaaaattccatctcaaaaaaaaaaaaaaaaaaaaaaatacaagccattcaggagtttggacaaaaggtactgcctgctcttgaccctttcaggaatcaacacccattataccaaccagggtcaaaaaacctggagagatgggtcatctgggtctcaactcccttatggaaagacccctttactgtcttactttccaccccaacagctatcaacatttctggcatctccagttggatacatcagtctcaagtgaaactgtgggaaggtcccgaagaaccacagaagaacaacagaattcagcacctgagcattcttgtgagccactggagaacttaaaattccacttcaagtgaaaagataagtaaagccttctctctgttcacccaaaactaaagtcaatctcagtacggggaatcttggttgcggtggcattggttcttctccttattttgacccaactggcatgccacctgaagtcccgataacagcctgatttctcactaaacactccatcgaaccacttcattatttgtctctcctattttcagcactttccttttgctttcacaaagcttaagggagaatcagctatgacagagaaattccttttcctttatctttccctccttcccatgcccctactctcacaggcacagtggaatgaaaattcccttgtcagtttttccaaaataattgcttcgggaaaccatctaagcaactgttggatctgccacaacttcatcaccaggtcctcatcttaccaatatattttggtaagaaatttttctttaaacctaacatttggttcaggaatccctgaaggccaacataaatctgttccgctccaggtttcgcttgctaactcagcgcaccaagtcccctgcctggatctcactccacctttcaatcaaagctctaaaacttctttctatttctacaactgctcttctctaaaccaaacctgttgtccatgccctgaaggacactgtgacaggaagaacacctctgaggagggattccccagtcccaccatccatcccatgagcttctccccagcaggctgccaccctaacttgactcactggtgtccagctaaacaaatgaacgattatcgagacaagtcaccccaaaaccgctgtgcagcttgggaaggaaaagagctaatcacatggagggttctatattcgcttcccaaggcacacactgtccccacatggccaaaatctactgttcccctgggagggcctctatcccctgcatgcaatcaaactattccagcagggtggaaatcgcagttacacaagtggttcgacagccacatcccccggtgggcctgtacccctcctggctatgtatttttatgtgggccacaaaaaaataaactgccctttgatggaagtcctaagataacctattcaaccccccctgtggcaaacctctacacttgcattaataacatccaacatacgggagaatgtgctgtgggacttttgggaccacgggggataggtgtgaccatttataacaccacccaacccagacagaaaagagctctgggtctaatactggcagggatgggtgcggccataggaatgatcgccccatggggagggttcacttatcatgatgtcaccctcagaaatctctccagacaaatagacaacatagctaagagtaccagagatagcatctctaaactcaaggcctccatagattctctagcaaatgtagtcatggacaacagattggccttagattacctcttagcagagcagggtggagtctgtgcagtgatcaataaatcctgttgcgtttatgtcaataacagtggggcgatagaggaggatataaaaaagatctatgatgaggctacgtggctccatgactttggaaaaggaggtgcttcagcaagggccatctgggaggctgtgaagtctgccctcccctccctcaactggtttgtccctttactgggaccagcaacagttatactcttacttttcctctttggcccttgtttctttaatttactgattaagtgtgtctcttctaggataaagcaatttcacatgaagtccccccaaatggaaagatatcagctatctgtcattggaggccccagcacctataagcacatctcccccttggatgccagtgggcaaagattccgggaaactatggaggaattttctctctgagacagagcaagagagggagaccctgatgacttcttcgccccatgtcagcaggaagtagttacagaagacccacgacgtccttacaaccagagcttttcagggtctccatctcttgaggagggaaatattagggtaggcaggtaggcaggcatgagcaggcaagagagcccttgggaaaggaatctttagaaacgcagcccactgatagcttccttggtgatgctgcccacagacagtcagcacttctctaataacccatcctagaacagccttttgcttttttttttttttttttttttttttttgagacaagttcttgctctgtctcccaggctggagtacaatggtgcgatctcggctcactgcaccctccacctcccaggttcaattgattctcctgtttcagcctcctcagtagctgggactacaggcatgtgccgccatgcccggctaattttgtatttttagtagagatggggtttcaccatgttggtcaggctagtctcaaactcctgacttcaggtgattcgctcgcctcggcctcctaaagtgctgggattatagacgtgagccactgcgcctggctactcagaacgcttctgaatggcacattcatgaaaaatcatgtaaggttctcataaaaacatctgcccagccattagtaggagtagacacgtccttttgatcagcccgccctgttctgtctttctgggtgtactgttttgatgactttaaaagctcccataaaaactaaggcactagcagctggctcattcttctgatgtcctctctttttaaataaagcttacttaaccctttaactctttctgtgtgtctcctgactgaattccttccttgaggaagaccaagaactgaaggattccccacccctcgtggtaaccaaaggtctatgaaggatttagtgcatctaaactagtaaatacaggctgggcgtggtggctcacacctgtaatcccagcaccttgggaggctaaggcaggtggatcacctgaggtcaggagttcgagaccagcctggccaaaatggtgaaaccccgtctctattaaaaatacatatattagccaaacgtggtggcgggcacctgtaatctcagctactctagggggtgaggcaggagaattgcatgaacccgggagatggaggttgcagtgagctgagattgcaccactatactccagcctgggcaacagagcaagactccatctcaaataaataaataaataaataaatagctaaataaataaactagtaaatacaaactgcactcaactgtccaagaaatattctttatttcttaaacgttgggaaaatataattaaaggcaaaataattttctcctcacccagaaatcctctccacaaaggaaaacaataaattgataatcccagcccagttagtggttggtgaatgcctctaccttaatcaatacatgtttcgaagcagtcagcatctattttctcatgaaagatgactccagagaacctggtctttgctttgcctggtaggtgaggaataccttaatcttatcagaaatatataaattggtcgggtgcggtagctcatgcctgtaatcccagcactttggaagtctgaggtgggtggatcacgaggtcaggagattgagaccatcctggctaacacggtgaaaccccgtctctactaaaaatgcaaaaaattagccgggcacagtggcgagtgcctgtagtcccagctactcaggaggctgaggcaggagaatggcgtgaaactgggaggcagaacttgcagtgagctgagattgcgccactgcactccagcctgggcgacagagcaagactctgtctcaaaaaaaaaaaaaaaaaaaaaaagaaatatataaattatgtggtttttcacaatatttactaaatttctcaactcacccactgtgaagacagcacaatttgaaagggacaccactcccttgtaatggaacacaaactcagcttctgctccgtaacaataaatagtaatagcaatactaaatgaaatattaagtagtttcatgtaagtatgtatacaattgatagtttgttattattttcagttttgcaattggtacaaattccatagaataattttccttctttctttttttgagactgagtttcgctcttgttgcccaggctggagtgcaatggcgtgatctcggctcaccacaacctccgcctcccaggttcaagcaattctccttcctcagcctcccgagtagctgggattacaggcatttgccaccacgcctggctaattttgtatttttttagtagagatggggtttctccatgttggtcaggctggtcttgaactcccaacctcaggtgatctgcccgcctcggcctcccaaagtgctgggattacaggcgtgagccaccgcacccagcctgaaaagttttttctgcagctattgagataatcatgggggttttgtccttagttctgttcatgtgatgaatcacatttattgatttgcgtaggttgaaccaaccttgcatgtcagggatgatatccttgatgaacactgatacaaaaatcctcaaccaaatactagcaaactgaatatagcagcgcatcaaaaagcttacccaacatgatcaagtaggctttattggcatatatatgccaataaagtaagataatgcagaatgaataaatctctagaaatatataacttactgccaggcgcagtggctcacgcctgtaatcccagtactttgggaggctgaggcgggtggatcacaagatcaggagttcaagaccagcctgacgaacatggtgaaaccccgtctctactaaaaatacaaaaattagacagggatggtggtgcgtgcctgtaatcccagcaacttaggaggctgaggcaagagaattgcttgaacctggaaggcagaggttgtagtgagccgagatcacgccattgcattccagcgtgggcgacagagtggtactttgtctcaaaaaaagaaaagaaaaagaaaaagaaaaaaaaaagaaatatataacttaccatcactgaatcaaaaataaattgtaaaaatctgtacatgcctataaataacactaaagtagtaatgaaaatgtcccaacaaaagagaccaagtatagacacgtaatttgtaatcactgcataattctactgaacatttaataacaaattaacactgagaacaatggttctccgctgcgacgagcaggaggaaggaaagctgaacagaaacatcttggtgcctaagccgtatgttgggggtttactataaaacaaatacattaatcatgtgatgtttaaataagtcgaatatttaataattactgggttaaaaaatggttccatcctctccgatggcaaagaagttctgatcctctgtctgagaacaatgataaccattttcaccaaaaacacatttcacaggcgctcctccaggaatacacagactgtggtctgtgttctggactatctgcaaatagtttaacatttgctgtttgacatttacatggacttcatatcttaaaatgggtaatgagatgaaagcatcttatcactgatgtctgtgtctcagctttccattccattcccagtcatgaagaatttggagtcagaagaccaggcgcggtggctcacgcctgtaatcccagcactttgggaggccgaggcaggcaaatcacgaggtcagaagattgagaccatcctggctagcacggtgaaaccccgtctctactaaaaatacaaaaaattagccaggcgtggtggcgggcacctgtaatcccagctactcgggaggctgaggcaggagaatggcgtgaacctgggaggcggagcttgcagtgagccaagatcgagccactgcactccaggctgggtgacagagcgagactccgtctcaaaaaaataaaaataaaaataaaaaagaatttggaatcagaaacacagtgactcacttgtagagtttcaaacataacataaacgaggcaggaatgctttccccttagtgttctaattttaaagcatttagcaggaacttgtgcacagtaatatttgacttcatgggcagtttcttgaatcctgttctgcaaagaggtggcatgcatccagatgtggcccctaaacaatccctgctgcccagcatacaacccacacaaatatacgacaagaaaacaaaaccttagaccaatatccctgaaaatattggtgaaaaagtcctcaacataatattagggggcccacaccccatctccaatccaggccccagtggagcttcttcccaagttcatgtcactaggtcacgggcaatggaatgtaagtgagataagagggactgagggaccgcatgggtgagtgagcaaatatgtcaggcaggatgcttcagactcaaagacttgcaactccaaagaatgacattttgttattgtaggtaactcctctggtatgagcagagcagggcagggcaggagagggctccccctccccatacacacacatcaggaatgtcaggcaactatcagatgatggtcaggtggttgttaaacatgtaaaataatagtcacagctggcaccagggaaaggcaggctcctcacacacagaaaacacctgaaactggtgatctgctgcttcccatgagatctcaggagttgggcgagtggactcaagcacgcacatgcggacagcccaccccaagggaagaatcagggaagcaagaccccggaagtataccaatgtataaaaccccaagtcaaaaggtcgaagtgcacacttgcctttcaagtcacccacttggcacttggccgtcttccaactgtactttccttcctttcatttctgctctaaagctttttttcttttcttttcttttctttttttttttttttttttttgagacaaggccttgctgtgtcactcaggctggagtgcgatgacatcatcttggctcactgccaacctccacatcctgggctcaaaagattctcctgcctcagcctcccaagtagctgggattacagccatgcaccaccacacccggctaatttttatcttttttgtagagatggggttttgccatgttgcccaggctggttttgaactgctggactcaagtgatacgcccatctcagcctaccaaagcattgagattacaggtgtgagccactgcgcctggccatttctgctctaaaactttttattcattcattcattcattcattcattcatttatttttgagacggagttttgctcttgttgcctaggctggagtgaaatggcgccatctcggctcactacaacctccgcctcccacgttcaagcgattcttctgtctcagcctcaggtcaggctgatctcgaactcgagacctcaagtgatctgccgcctcaggtcaggctggtctcggactctcgacctcacatgatctgccgccttggcctcccaaagtgctaggattataggcatgagacaccgcgcccggccctgctctaaaactttttaataaacttttgctttcattcctgctctaaaacttgcctcagtctctccttctgccctatgcccctcagttgaattttttcttctgaggaggcaagaattgaggttggtgcagacctgtacggatagggattcaccacctgtaacaatttcagaaataagagaaataaaaatcaaccgatactattactttacctgagtaagagccatccctgtttccttttcttcctcttctaggcatcttccttgggtaacatgaaaaagcctttacaagtcgatcctgaatgtctaaaatatgccatttaatgactggaatcaacaccctcatttttgtgcctcaaacacccattcagggaagccctcactgtggaaagccagttctctgggagtcattgcaccagatggaacacagggacgacaggctcctacaggaagaccaacaggtgagttttgggcccatttcttcagaacccgctcccctcccagagaagcccacacacacactgcagccgtgggaagctgggctggactgagcttctcttcaggacacagacccagccctgaccaaaccccatgcagagcacagcccccctcacccatctgtggatcacaggctgatttcagcccttagaaacaaagggcggagcctgggtgctcaatgctggacacccatggaatcacctttaaatattattaaggacacgtcccaatgtatttgaatgaaaacttcaggtaagggggcaccagaggtgtgcctgcaaaatgccccagatgcctgctggactcccagaggagagttgaagagacaattggacacaggattccagtgttcaggggagaggtctgcagggaacatggagccgtgtaggtgggtttaaagccatgagatgagatgataagggcagtgggtgtgggcagagatcagaagtccgaggggtaagctgagggtcactccacattcagaaaacagagctcaagacatactagaagagaaaagtgtaaagtgatcagggaggcaagaagaaaattaagagaaatacatttttattttttttaattaaaaacatttttgacgtggagtcttgctctctcgcccaggctggagtgcagtggcgcgatctccgatgactgcaacctccctctctcgggatcaagcgatttgcctgcctcaccctcagagtagctgagattacaggcgtgcagcaccacatccggctaatttttagtagagacgggggtttcaccatgttgggcacgctggtctcgaactcctgacctcaaatgatccacccgcctcggcctcccaaagtgctgggattacaggcgtgagccaccgcgcctggatccttctttcgctcttcccgtctctgcgaatcccgacccatcctctactttgccatgtgtttatgggtttccttcattctttcctctcagtttttgtaattcactctcagcccctctctgtttcctgatccctttggcccacacattcacaggagggtttggagtaagacacctggatcctggaggagcacattttccagcgggtggagctgggcaggcaagaacaccgggtgtcacaggacaggccccgggcacctccccaacgcgggcgcaggggaagcggtgactgcgaaggggaggcctggggagcagcagggcccggcacgaggaggagggaggtggggggcgacggcgccttaggacagggtagggtctgcaggagcctaggaccaggcggaggacgcggtctgcggcgctgcgctccagggccgacgacggagaggctgggaggcgctcaggacgggaatccacctcgcaggtgaggactttaaaaagcgcggggcgggaggaggggtcaggaaagggttttatgcgggaagaagacgcgaatggcaggggacagggactggtctcagagcgagttttacccacatggcgaggtccgtatttacctcgggtgaagggcgcgatgcggggattttaaggtcagcagagcgggtgtggaaaagcgggacggcgaatcgaaggcttaatctacacctaggcacactcttgctcggcggtgtcaccttcacacaccgcgatccgcttccgggactccaagaaactgcacgtgcgcgcagagcccgggtagcctggggcggagcccggggagaggcggggtctgcagagggaccgcgggggcggggcctgtgcagttgtaaggtaaaaagcatagagttgtgtgggccccttctgttggaaagcaaaatgttttcttcccaccaagatgaaaacggtttatctcaaaactatttttgccagcaggttggacccgatcctgctagggagtctcctgcagctcagcggtctgggaactgcgaattcggtggggggaggggggtccaggaggagcagtgagtgattggatccaggaaagttcctgcaattcaaattaattggagtaacttactttaaaagccctgaaattatctgtgaaggggttgcaaactagactgtgaaatgcaaaactgcccggaacaaatgtgatacgtaatgctattgcccaaaggatcctcctttccatttctatcccatacctatctcaggggaagagtcaagtctgtgcttccagagacttttataggacaacacctggaccgtgggctgtggaccgtggaaggctaaaacccgcagtaagccagatcaccaactgctgctttaaaacacgcaataacttttaaaaaaaaatagatatgaattgtattgttcttccttatacttgttattcggttccacggttgacaaaacctcaaataactttgagataaactttttttttttttttttgagatggagtctcgctctgtcccccaggctcctggaatacaatggcgcgatctcggttcactgcaacctctgcctcccaagctcaagcgattctcctgcctcagcctctggactagctgggattacaggcgcgtgccaccacgcccggctaatttttgtttttagtggagacggggtttcactatgttggccaagctggtctcaaactcctgacctcaagtgatgcgcccacctcggcctcccaaagtgctgggatgacaggcatcagccaaggagcccggccgagataaactttctttaaatcatactatgcttaaatcgataatatctaaactttttttttttttttttttttgagattgagtttcgctgttgttgcccaggctggagtgcaatggcgcgatctcggctcactgcaacctccgccccccgggttcaagcgattctcctgcctcagcctcccgagtagctgaccaccacacctggctattttgtatttttagtagagacagggtttctccatgttggacaggctggtctggaacccccaacttcaggtgttccacccgcctcagccttccaaagtgctgggattacaggcgtaagtcactgcgcccggcactttttttttttttttctttttaagattaggaaacagacgtcagaagcagccaaatcaggtctgtaaggtggatgcctaatgatttctcattgcaacccactgttgcaaaactgccgttgtttaattagaggaatgaccaggaacattgtcatggtggagagggacgctggtgaagtttccctggacatttttctgctaaagctttgggtaactttctcaaaaatgctctaaaaataaataagtgttattctatgtccctctagaaagtcgacaagcaaaatgccttgtgcatcccccaccgccaaaaaaaaaaaaaaaaaaaaaaaaaaaaactattgccatgaactttgttcttcaccgctcagcttattttaattaattaattattgagaaagagtctcactctgttgcccaggctggagtgcagtggcgcaatcatggtgcaccacaacttttacctcctgggcttaagtgatcctcctacctcagcctctcaagtagctggaaccacaggcacacaacaccatgcctggctaattgttttataattttttgtagatacagagtctccttatgttacctaggctggtcttgaactcctaggctcaagcaatcattctgcctccatctcccagaatgctgggattacaggtgtgtgccacagagccaaggttcactggtcagccttttgctttgactggactatttccacctcttggtaaccattgctttgattgtggttttttcagcattgtactggtaaagccatgtttcgtcttctgttaaaattctcctaagctacctggagttcacacagctgcactattcctttatttttttattattattattttttgagacaaaggttcactctgttgcccaggctgaagtgcacttgtgcaatctcggctcactgcaacctccacctctttggttcaagtgattctcctgcctcagcgtcccaagtagctgggattacaggcatgtgccacaacgcccggctaattttttttgtatttagtagagacggggtttcatcatgttggtcaggctggtctcgaactcctggcctcaaatgatccacctgccttggcctcccaaattgctgggattacaggcatgagccacctcacccggccctgtaccgttccatagaaagagcttgtgtatggccgggtatgttggctcatgcttgtaatcccagcacttcgggaggccaaggcagatggattacttgagctcaggagttcaagaccagcctgggcaacatgatgaaaccccatctctaccaaaaaaaaaaaagaaaaaaaaaaaaaagaggaggaaaaaataaagagctcatgtagaccaggtgcagtggctcacacctgtccaccatttcccaactgagctactgcagctccctacctcctgggagcaagctacctaggagacactccatcacccccttccctgttttggctgggccacacccctggctacttaaagcccgaaaacacagtgcgtgaatcaacctcgttgggttttggacatgtaagttacctgagctacccaccacatatatacctcttcaacgtaactccttgcttgctgttggacactggtgggaacggtgcatcttatagccagagctctgtgtcaccctgtaacatgaactgcccattctcactcgggtgctcacaaaccttatcgataaaattggacaggctcaatagagctcaactataaaatggaactggcatattcaagatgaggcacagcagaacctcaagggaccagtatactccatgaacaaatgggtagcttacaagaaggggtcaaacagtccttaaaggatcctctggctcctcttgtggctacctgggacccaagattcacatatatgcccaccaagtgtatggcatggtttactgatgtctctgcaaaacaataaacacacagggtctactgggcttcagcccagtggatggccattctttgacccagtgaatggccattcagccagtggatggccattcttgactaagactagacatagacattctgcctaattagccaaactgcatgcattggtaatggccctgcaggccacgtccaccaccatatctcatcacattttcatgactcatgagccatgcagacttgtgtggaaccctttaatgctgcaggacagccaggggctcctttggttcacccaatcttcgaaactgttgtattaagacctttgtttcaacttcatcaatttccatttccattttactcatcccgttttttttttttttttttttgagacaggctctcgctctctcacccaggttggagtgcagttgtccaatcactgctcactgcagcctcaaactcctgggctcaagtgatcctcccatcctggcctcctgagttagctgggcccacagaagttcaccaccacacctgactaatttttgtatttttttgtaaaacagggtttcgccatgttgcccaggctggtcatcccatttcttaattaccatctaaagatttccactctgctgggaggagagccatgactctcccctacctttccccgcttagtttcattttatgaatgcttttttttttttttgagacggagtctcgctctgtcgcccagactggaggagtgcagtggcacgatcttggctcactgcaagctccccattccaggttcaagccattctcctgcctcagcctccagagtagctgggattacaggtgtgcgccaccacacccagctaattgttttgtatttttagtagagacagggtttcactgtgtaggccaagctggtctcgacctcctgacctcaagggatccacccgcctcggcctcccaaagtgctgggattgcaggtgtgagtcaccatacccagcctgtgaatgcttgctttattcaccttttttcttaatgacgattttaaaatttccaccttcatgaggagaagtcctttgaatctcaactattttcccccatccattctcttcttaattaacttgatactgttaattggcacttgaaagttccaacaggagatgtggagacagcaaatttgataaggcttcctgagctgtcttttggttttgtagaagtaaggtaccgtgggatgtatacattaaaggaacaaccttatttttctccccttccttgcttgtagttctcaagaataacttcagaatgttattctgaaggtaacaccctgaaatatgaagaaactggccaaagcagccgggctccattccagagccccctgcccccctttcaaagaacaggatgtccttcagtgctttagggcggctcatcacgaggccatgtgccataaaacctagggtgggtgctctctggggtccctcagcatcagtgccggtgggacaccagtagatgagactccatcttccccaagcagttttcctgagccttgggggaccagcttgcaatgaatcagtcctaggcttctactgccccttgttgcctgtcagtagtcaactcactttattgaacttgtgtgcatgggttctgtctcactggagtcagacattcggtaaccagtgcgaagtgaacctacttcacaggcaaggagagtctgtaatcctcctacgcttggcagtgggaatgcacaatggcacacccactatggaaaacagtatgttggaaaacttcctcaatatggtgcctacaaaaccttacagcaaacatcatatatcatggtcaaaaagtgaaagtttccttcccagggttggggacaaggcaaagacgtacactcttaccacttctattccacatagtgttagcaattcttggctgagggtagtggctcatgtctgtaatcccaacactttgggaggctgaggcaggaggactgattgagtccaggaatttgagaccagactgggcaagatggggagaccctatctatctctacaaaaaaaaaaaattgaaaattggctggtggctgggcgaggtggctcacgcctgtaatttaagcactttggaaagctgaggcaggaggatcccttgaacccaaatgttcaagactgcagtaaggtctgactgcaccactgcactccagcctgggtaacaaagcaagaccccatctagaaaataataatactagtaattgaaataagaaaaataatagagaccaaaaaggaaggcataatactgtacacgatgagatggttgtggtaagctaatgacccccacccccaaagatacacacacaaaggatttccgtatcaatagccctataccctgtattacatggtatctcaaatcagagtttgcagatgtgatctggctgaggatcttgagatggcagaatatccaggattatctggttgaagcaacataatcacaagagtccatataggaaaaatacagatggacttagaatcacagagaattgacaatgcttgcatagcaaagagacaaagagattttatgacactaccttctggctgtgaaaacggagggacgtagaccatgaggtaaaggatctaagtggcctctggacctagcaggggtaaagaaataaactctcccctagagagtcaagaaggatcatagttctgtaaacctgacttctgaccaccacacattaacagcataaatttgtgggtttttttttttttttttttttgagacagagtcttgctctgtcgcccagactagagtgcggtggcatgaacttggctcactgaaacctccgcctcaagcaattctccagcctcagcctcctgagtagctgggattacaggcacgcgccaccgcacccagctaatttctgtagttttagtagagatggggtttcgccatcttggccaggctggtctcaaactcctgacctcatgatccacctgcctcggcctcccaaagtactgggattacaggcgtgagccaccatgcccagcctaaatttgtgttgttttaagccactcactttgtggtaattgttacagcagcaatgggaaattaagtttatgtagaaaaccctaagaaatctaaaaaatctggagaacgagattttaaggaaatagactaccaaattaacatacaaaaactactttatttctatatactagcaattaatacatggaaattgaaaataaaatacaatactcctctggtttgaatatccccaacaaaactcatttggaaacttgatccccggtgtggccatattgagaagtggggcctttaagaggtcattggatcatgagagctctgctgtcatgaatgaatcaatccatgcacagattaatggactgtgttatcatgggagcagaagtggtggttttataggaagaagagagacctgagcaaacagcatactcagtgctctcacaatgatgtgctacattgcttcaggatgctgcagagtgtccaccaagaaaccctaaccagcactgaccaaaggtcaaaaaatgtctagtaaggagacctttatttcttacacagggttgcagcctgcaggctgggaagcatggtctctaccagaaacaacacaggcagttcagaggaggaaagttgcggcaggaatttatactgaatagcaatatgttggatattaagtaaacatactcaataggttatgggagagtcatgcgtgtgtgataagcaaacatacatgttcctagtttatctaccagaacaaaataaaattctcattttctatattcactcttaagaggaaactcatgaacattaatcttttcaaattatatcaatattccaagaacatcatgaaggaggttttattattctccactttttttttttttttttttgagatggagttttgctcttgttgcccaggctggagtgcgatggcgtgatctcagctcactgcagcctccaccacctgggttcaagccattctcctgcctcagcctcccaagtagctgggatttacaggcatgcaccaccacacccagctaatgtttttgcatttttagtagagacagggtttcaccatgttggccagtctggtcttgaactcctgaccttaagtaatccacctgcctcagcctcccaaattgttgggattacaggcgtgagccaccatgcccagccaacgttttttttttttttgttttgttttttgagaacgagtttcgttcctggtgcccaggctggagtgtaatggaatgatctccattaatagaacctctgcctcttggattcaagcaattctcctgcctcagcctcccaagtagctgagactacaggcatgcaccactaagcccagctaagtttgtatttttagtagagatggggtttcactatgctggccaggctggtctctcctgacttcaggtgatctgcttgccttggcctcccaaagtactgggattacaggtgtgagccaccgtgcctggcctgatttatatttctcgcattcttactatgtattttcacttcatggaaaccaagatgcaaagcatgggtcttatttggcacacaagaaactgatgtggaaatataataatgtggtgcatatgcatcaatggcaatgcagattttggggtgtaagaatgtgaaattaactttcagtaagattttcattataccccaataagtatcctaagccacagtgtggggcacgtaattcaagcacaaaatgcggttataggtttccaaaactgcgttatttgatttcaccatgaaaaaaattgttcttgatcgtttaagagcctagtggtgtactgctattgtgttatggagtatcctactgagacaggataaaactatgttggcagaaagaatgtgattcattcatagagaaaaaccattctattttattagttaaaacattatatctatgatacattctgaataaaacattagcaaaatgtgcttcaagcagataatgtgagttctactaaagaatatgttactctacttctgttgattaaactcttcactctgacaactactctctcttcagtttttctttttcttctttagatggagttttgttcttgttgcccaggctggagtgcagtggcatgatcttggctcaccacaacctccgcctcctgggttcaagcactctcctgcctcagcctcccaagtagctgggattacaggcacctgccaccacgcccggctaattttgtatttttagtacaattggggtttctccatgttggtcaggctggtctcgaactcccgacctcaggtgatccacctgcctcagcctcccaaagtgctgggattacaggtgtgagccaccgcgcctggcctctctcttcaatttcaaaacaagatcaatttttcatcactctttgctaaacaacaggtattgctctttgatgcataagagggcgaccttttcccctgcagtatttctaccacacaatcagtgtctaattacctattactctcctcccacaaaaatcccaatgtcctaaggtcttggcctgctccatttcatgttcagttgatagaccatttctttcctctaagccacagtactctcctggtaggagaaaggcaccctgaacattatcagaatggtgagtgacatcatagttttacattgtttttcgccactcccaaatgctaattcagatgatacttaattttaaaagcaaagtcctccttcttcacaaattggatagaaataatccttcacctaatcaatgatcttcacccaatcaatgatccttccatcccaatgatctttccaagaaagcaccatggaaggtgtgtaaggatgcacaataagatttcaaagttcacattgaaacgcaatagtaggctttccaaaaaacctcaaataactcagtgaaacatttcataaggtgaaggtaactgactgcctacaaatatcctgcaaccttttcgtatgtgagttaaaaatatataatttttagcatatttggacttgtgagtattctacagtgtataatatcaaaggcaaacagggaaaccagagactgttattcctcctaggaatcctcacttaccatcggtcactgggtaatggcctcaggatgcatattacatttgtttcgtttcatcaaagatataaatcttgatgcctagtaacctgcgaggcctggatagaccctctgccacatatgtttacatgatgtctcttgcttatggcctctcatatctattaatgcttcaactcatgagggattggccactgtcactacatttgtaaggattctgtcaagaatgaaattaactgatgtgaaaggagtgaattgtacctaatgacctcaccacactcatttgtaaggtttctctccggtatgcattctgtgatgacttgcaagatttgaactctgcctgaagaccttgccacactcattacatttgtaacgcttttctccagtgtggattgccatatgggtagttagacttgatcttaccctaaaggctttcccacactctgtacacctgtaaggtttctccccagtatgaattcttcggtgatttgccaggtgagcattttgagtaaagaccttgccacattcattacatttgtaaggttttttcccagtatggattgcctgatgggtggttaggcttgaacgaacactgaaggctttcccacactcattgcatcggtaaggtttctctccggtgtgagtcctttgatgatttgcaaggtgtgagttctgagtgaagaccttgccacattgattacatttgtaaggcttctctccagtatggatgaccttatgggtagttaggtttgaatgcatactaaaggctttcccacactcattacacttgtaaggtttctctccagtatgaattcgccgatgagttgcaaggtatgaattgtgcctaaaaaccttgccgcattcatgacatttgtaaggtttctctccagtatgtattgcctgatgaaaagttaggcttgaacgatcactaaaggctctgccacagtcattacacttgtaaggtttttctccagtatgaactctccaatgccttgcaagttgtgatgtttgagcgaagactttaccacattcattacacttgtaaggtttctctccagaatgaattccccgatgacttctaaggtgtgatttttgagtgaagctcttgccacattcaatacatttgtaaggtttctctccagaatggattgcctgatgggtagtcagacttgaacgaacactgaaggctttcccacactcattacacttgtaaggtttctctccagtatgaattcttcgatgatttgcaagttgtgaattttgagtgaaaaccttgctgcattcattgcatttgaaaggttttgttccagtatggatgacctgatgggtagctaggtttgaatgcatactgaaggctttgccacattcattacacttgtaaggtttctcaccagtatgaactctccgatgccttccgaggtatgaattgtacctaaagactttgccacattcattacatttgtaaggtttttctccagtgtggattgtctgatggattgctaggcttgaacgaacactaaaggctttgccgcactcattgcacttgtaaggtttctctccagtgtgaattctccaatgacttataaggtgtgaattttgagtgaagagcttgccacattcattacatttgaacggtttttctccagtatgaattaactgatgggtagttaggtttgaatgtcctctaaaggcttttccacactcattacacttgtaaggtttctctccagtatgaattcgccgatgagttgcaaggtatgaattgtgcctgaagaccttgccacactcatgacatttgtaaggtttttctccagtatggatgacctgatgaatagttagatttgaacgaacagtaaaggttttgccgcactcactgcatttgtaaggcttctctccactatgaattctcctatgacttgtaaggttcgaattctgagtgaacgccttgccacattcattacatttataaggttttccacaactgtttgcttttcgtctttgtgtgagtaatgaaaaatggttaagttcatgatattttttagacctgtgggtttggacactagaaggaatttgttgaagtggtgacactgaggaaccattgttggtagacttctcaacttgattacattcatacattttcccctcaccttgaaatagctgcagttcaggcagatgagaatgaaagcttactccaagctgattgttcataagcttgttttctatgtctcttctgtcgcgttgatctcttttaccttctttctgggccataagcactcccttgtaatttcctgtgtcatctctccattgacactcaaaatcatgcacatttttctggggttccttgaaggaaaagtcttcaatgtcagggctttcgtgtctttccaacaccactgtgtggaatactgcttctgtactgctcttctcttttggtagcaaatccttgattgtacatttaggagggatatctacaagatataaagaaccacataatttccaattaattacagtatagaaataaatattttacattgaaaacatattccaccaaaagtaatacttatattgaacagactttggaacttcagaactgtgaatttcaattgttaggaacaaaaatgtttttttttttttgagacggagtctcgctctgtcgcccaggctggagtgcagtggtgtgatcttggctcactgcaagctctgcctcccgggttcacaccattctcccgcctcagcctcctgagtagctgggactacaggcgcccgccaccacgcctggctaattttgtttttgtatttttagtagagacggggtttcaccatgttagccaggatggtctcgatctcttgacctcatgagccgcctgcctcggcctcccaaagtgctggaattacaggcgtgagtcactgtgcccagccaaaagtagtattttttaacaaagaaaatgcagttacatgtaattcaaatatttgggaagggctggctgttgtggctcatgcctgtaatcccaatgctttgggagcctaaggtgggaggatcacaggaggccacgaggttgagaccagcctgggcaacacagcaagactccatctctacaaaaacaaaataatttaaaaattaggccaggtgtggtggcttatgcctgtaatcccagcactttgggaggctaaggtgggtggatcatgaggtcaggagattgagtccagcttggccaacatggtgaaaccccatctctactaaaaatacaaaaattagtcaggcgtggtggcatgcgcctatagtcccagcttctcaggaggctgaggcaggagaattgcttgaacctgggaggcagaggttgcagtgagccgagatcgtgccactgcactccaacctgggcgacaaagcaagactccgtcaaaaaataaaaataaaaaaattagtttggcatgctggcatgtgcctgcaattctggatactcaagaggctgagggtgctgggtgcggtggctcacacctgtaatcccaacactttgggaggccgaggcgggtggatcacctgaggtcaggagttcgagaccagcctggtcaacatggcaaaactctgtctctgctaaaaatataaaaaattggctgggtgtggtaatgggcacctgtaatcccagcaacttgggaagctgaggaaggagaattgcttgaactcaggaggtgaggttgcgccactgcactccagcctggggcaacaagagcaaaactccgtctcatcaaaaaaaaaaaaaaaaaaaaggctgaggcatgaggattgccttagcccaagagttcaaggttacagtgagctatgattgtaccactgcactacagccttagagacagtgagatgtcttaaaaaataaaaaaataaaaaaaaaatcgggcagcctagattcaaactacctatgaccaaaacactcacgttgtgaatcctatgttagccatcagaggattatttttccacgctgacctcacggcacataccaattggccaaaaacatatggctatctcaattgaagaaaaataagttatacacatttaaagcatattcattatgtacaaatacatactaaagtacaacataatatattataatggcaaagagctcacaggaaacataattaagaagcgggaattttgaactgcaaaaccatcatagcactaggaaaatgaacattcaataaaactatgtcagaaaaaaatgtgttgaaatacttgttatataactatctatatccacacagagcagataattttgcagcattagtaagtggtacatgacagttatatttctttctttctttttttttttttttagacagagtcttgctctgctccccaggctggagtgtagtgctgcgatcttggcttgctgcaacccccgcctccagggttcaagtgattctcctgcctcagtctcccgaatagctgggactgcaggcatgtgccatcatgcctggctaatttttgtatttttagtaaagacaggatttcaccatgttggtcgggccggtctcgaactcctgaccttgttatctgcctgcctctgcctccccaagtgctgggattataggcgtgagcctctatacctggcctgacagttatatttcacaatacctgctgaaaaccataatgtattcattttatgaaaatcaactaataagatattctagcagcctatgataaaatgaattgagaggaataactgcatatataaaatgttcttgtttaaggccatgtgtggaaacttaaaaaaaaaattattggccaggtgcagtggctcatgtctgtaatcccagcactttgggaggctgcagcaggtggatcacctgaagtcgagagttcgagaccagcctgaccaacatggagaaacccgatctctactaaaaatacacaattaaccaggcatggtggcgcatgcctgtaatcccagctactcgggaggctgagacaggagaatctctcgaacccaggaggcagaagttgcggtgagccgagatcgcaccattgcactccagcctgggcaacaagagcgaaacttcatttaaaaaaaaaattattgtccgtggaataataaacagttttgtcttaagagaaagaagcatttttatttagaaccaacacaataagaactggaatatgatttttaaaaaaattctatattgacaaattatagttatatatatttacaggaaacaaactgatattctgttataggtatacaatatggactgatggaaacaagcctattaccatataagtcatctcaaaaacctatcatttactcctaatgttttcacccagtgaccaacatctccctattccctccagtccccaacctgtggtaacccacattctactctttgctgctattagttttattggtttagattccaaatgtaagtgacaacatgcagtacttgtatttctgtgctgaagcctggaaaaacagaatacgcaccccatgtaagactgaggatcaatgacagaaggattttgttaggtgtctttacggttatgctgagaacaatcttagaagatagaacccactcgcttatcacacacccccatgaaagtggcaaaagcagaatggaagaaatggccgagggacctcgacaggcggagacggctggagactcttccatgaggtttggggcagcagatgccaaggagcagcagccaatgtttccatctcctgagcaggtcttccacgcacaggaaatggggtggaacataaacaggtctagacgtcaggactaaggactatggaggcttcccctctgacccatatggactaagaactgagcaccatatggaattaaatacagagggagagaccaagaaagaaagcagtttcttcagaaggaaccatagagttcaaatgacagggtgttgtccatcatgataaagactttgcctctatctctaaggcaacttattttcccaaagaactctctcatctgcagagagtttcccactttatttatttatttattttgagacggagttttgttctgtccacccaggctggagtgcagtggcatgatcttggctcactgcaacctccacctcccgggttcaagcaattctcttgcctcagcctcctgagtagctgggactacaggcacacgccaccatgcccggctaatttttttttgtatttttagtagagatagggtttcacaatgttggtcaggctggtctcgaactcctgacctcaagtgatctgcccaccttggcctccctaagtgttgagattacaggcgtgagctactgtgccccctcccacactctagttaatgagtggccttctctctgcccatctgagctcttacctgtgaccacgcctttgacacattccggcgttcttggttttcttgctattttcacacagctcttcacagtccagggctctttcccttcctccaacatggagataatattcatatcaaaatgacacagtcctgtttataaaaagaaaggatcacaatgtgccggggcttttccagaatcccagccctatgtttacatgagaggacattatatgtggatctaagaaaacttcaaaaattcatccactgggccaggcgcggtggctcatgcctgtaatcccagcattttgggaagctgaggtgggtggatcacaaggtcaggagatggagatcatgatggctaacatggtgaaaccctgtctctactaaaaacataaaaaaaaattatccaggtgtggtggcgggcgcctgtggtcccagctactcgggaggctaaggcaggagaatggcatgaacctgggaggcagagcttgcagggagcctagatcacgccactgcactccagcccgggcgacagagcgagactccgcctcaaaaaaaaaaaaaaaaaatcatccactgaatgcctccttctgaatacccaggaaacatggtacatgctgatagaaggctctattccaccaacaacttaatccaaagcagagaggtagaaaacaggaaatctgacatttcaaaagtctaacacaatgtattatgcatacaaaagctctgaaacctcaaatgatgaagtacaaaggaggcagaacatctgagaaaggggaagattaaagtccaggtttcccatgattaagctttccatttcagagtcaacaggacttcaatctcagtcaagcaatgcaggggctctccagggactcgtaagggaaaatgcaacaatagacaagaacagatcttgacttctggaagaaagtcatcctcacccagagaaacaaggttccagtagttctccaacatcacgtccctgtataagatcctctgagcagggtccaggcatttccactcctcctgagagaattctatggccacatccctaaatgtcaaccgtacctaaaatgaaaaacacatttcaccaagtggctaaggggagagttcaaaatttcacataaaaggagaagaggagaaaaatgtgagaataggttaaattgaagtgggtgagctgacagatccagattgtgacaatgtgacatacagatttggtcttcatccccctctcctgacataagagctcacttgaaatcagtggagtgataagtatctttttgtacattaatgggataattggtgtctggagcacctaggtagcttcaggatggagggcggtcaccggaactaaggctcggtgggtggtcactggaaaggctgaggctcggttagactaagcctctgtcctctcgggaggacagagggaatgaaagttcagttgatcaccaatgccaataatggaagcaaggcctccataatggggcctccatgaaaactcaaaaaagacagaatacatgagagaatacatcccagctcctcactcctttcccatatctcaactaatagatcacttccatctagatgttcatctgtgtgctttgtagcatcttctataataaatgggtaaatataagtgtttccctgtgttatgtgagccactcaagcaaactaatcaatttcaaggagggggtcatcagaattcacaattcacagctggtcattgagaagcacaggccacaacttgtgtttgtgactggcattaatgtgtgtgcgctgttgtgggattgagccctcagcctatgggagctgaccctatatccagatagacagtgtcagaatggaatcaaatatgagaacacccatttggtgtctgttgcagaattgtttatttgatgtgtagaggaaaacccaatacatccaaaatcacagaagtatttgtattatggaagcaaagcaggagaaactgagtctgtttttcccatattttcctacgcattaaggacttttgagcaagttatgtctccctaattctgtcttattattcttttacctaagaggttgtgatatcctctatatcagtgtcgatttctcagttttatgggcaataagtatacaaataaaaaacagaaaacaaggttatctctatggaagtgttagacattatgtttgacatactgagtgatattcaataactacatgaactaaataagcacaactggtatcttaagaaatgataatgcggccgggcgtggcggctcatgcctgtaatccagcactttgaaaggccgaggcgggtggattacttgaggtcaggagttcaagaccagcctggccaacatggtgaaacctgtctctactaaaaatacaaaaattagccaggcgtggtggcaggcgcctgtaatccaagctactcgggaggctaaggcaggagaatcacttaaacccaggaggtagaagttgcggtgagccgagatcacgccactgcactccagcctgggtgacagagtgagactccatctcaaaaaaagaaaactgtactgaagtgatgctgtctataagacagaggagtaggaagtcccaagcactacccatggagacacagatttaataacactacatggaccaaattgtctttgtgggaaatctggcaaccacatcagaggtcagaactcttttgaaacacctgctcacctgaggccctatcctgccatgatgtagtatcactgtgagaaaaccacacttccattttctcctggggagagaaagtatgggaatatccatctaacattctgactttttttttctcttttttcctgtaacacaacacaaggctcataacgttctgacttttcagggcactgctaagggacaagtttctgtcttgcctgaatataaacactgaagtaacaggaccccaggtaaggaagctactgagaacaaagccatccgtcataaaccagagcttgtagtaacgtacgcagacattaggtggcggtgcagcccccagcttactaggacaccagcgaggctgcggaacagccggcagacaacagaggcattcctgcatacaaactggcacaagctctttagttaagctacaatcaaaaagtccacggaggacgcatccttagaaaaggcttgagggatctccagagcctctagtcaggatgactgtagcatgtcttccctgaaggaagccagaatcaaaaactacaagtggctgattagtgaaatgctgtggtcccaacaggagataacgagatatcaaaagaagccaggcacggtggctcacacctgtaatcccagcactttgggagccgaggcgggtggatcacgaggtcaggagttcgagaccagcctggccaaaatggtgaaatcccgtttctacaaaaaatacaaaaattagccgggcgtggtggcggatgcctgcaatcccagctactcaggaggctgagacagagaatcgcttgaacccgggaggtggaggttgcagtgagctgggatcccaccactgcactccagcctgggtgacagagtgagactccatctcaaaaaaaaaaaaaaaaaagcaaaagaaaaaaagaaacatggaccatatgcagcaacatattaaatcaccacaaagtaatactaaagaagcagatatatatatatatacattatcaaagaaataacaataagactcctaaagttgctcagtgtattaagacagtactcataaacaacttcagaaaatcagaaaaacaataaatatgagattatcaacaaagagataaaaattatgaagaagaaacagaaattctagagctgaaaaacataactgaattaaaaaacacactagagccaggcgtgatggctcacgcctgtaatcccagcactttgggaggctaaggcgggcggatcacgaggtcagaagttcgagaccagcctggccaacatgatgaaacctcatctctacaaaaatacaaaaacttagctgggcatggtggtgggcacctgtaatcccaactactcgggaggctgaggcagaagaatcgcttggacccaggagatggaggttgcaatgagctgagatcgcaccactgcactccagcctgggaaacaagagttgccacctcaggggaaaaaaaaaatacacaaaattagctgggtgtagtggcatgagcctgtagtcccagctactcaggaggctgaggtaggaggatcatttgagcctaggaggttgaaggtacagtaagctatgatcatgccaccatattccagcctgtgctacaaagtgagaccccatctctaaaaaaaataaataaaaggagaaaatgaaatagaagaatgatgaagatagccaggcatggtgatgtgtgcctgtaatcccagctactcaggaggctgaggcagaagaatcagctgaactcaggaggcagaggttgcagtgagccaagatcacaccactgcactccagctttgggtgacagagtgagactgcatgtcaaaaaagaaaagaaaagaaaagaaaaatgaacaaatgaacatagcctaagggaagtgtggaacaccatcatgtggtcaactccaatgtcaaagtaagaagaaggagtataagagaacttaacctactgtgtctgagtgagaaagaaaaaatctgtatactctcataagtagtaaggcaactggagcagcaatcaaaaaaaaaaaaaatcctagaacaaagaccaggaacacatgcataactcataagcactgtacaattctactcaatgttgaatgaagaattaacaattctcaaacaattccaaataagtgaagaagaggaaacaacaaaaaacaattgtatgataccacccttagtctgacaccacccaagcaaatatatgacaaggaaacaaaagtgtaagatattattcgtgataaacactgatgcaaaagccctcaacaaaatactaggaaaccaaattgtaaagacattaacaggattatagtccatgaccaagtggactacacactgggaagacaagagtggttcaacagaagaaagtcaatgtaatacaccacactgacatggtgaaggaccaaaaccacatgctcatctcaatcggtgcaaaaaaaagttatttgacaaaattcaacatagttcatgataaaaatgctcaacaattcgggcacggtggctcacgcctgtaatctcagcactttgggaggccaaggcaggtggatcacctgaggtcaggagttcaagaccagcctgaccaacatggagaaaccccgtctctactaaatacaaaaatttagccaggcatggttgcacatgcctgtaatcccggctacttggatggctgaggcaggagaatctcttgaacccgagaggcggaggttgcagtgagactgtgccactgcactgcgctccagcctgagcaacaagagcaaaactccatctaaaaaaaaaaaaaaaaaaaaaaaataggctcaacaaatcaaggaaacttcagaatattagatttggcaaagatttcttggctatgacaccaaaaggaaacacaatagcagcaaaaaaaaaaaaaaagggactgcatccaaccgaaaaacttttgtgcatcaacagatgctaccaagagtaaaacagtatgcctgtgacaagtcctagccagagcaatcaggcgagagaaacagaaggcattcaaacagaaagagggctgcatgcagtagtttgcacctgtaatcacatcactgtgggaggccaaggtgagagggtagtttgagtccaggagttcgagaccaacatgggcaacatagtgagactctgtctctattttttagcaacgacaacaaaaacaacaaacgaaaaggaaaaggaggaagtcaaattatctctctgagaaggatatgattctgtatctaaaaaaccctaaagattccactaaaagactcctagacctgataaatgacttcagcaaagtctcaggatttaaaatcaaggtacaaaaatcagcagtacttttttttttttttttgagatggagtttcgctcttgttgcccaggctggagtgcgatcttggctcaccacaacctctgcctccccggttcaagcaattctcctgcctcagccttcctaagtagctgggattacaggcatgcaccaccacgcccggctaattttgtatttttaatagagactgggtttctccatgttggtcaggctggtcttgaactcccgacctcaggtgatccgcctgccttggcctcccaaagtgctgggattacaggcgtgagccactgtgcccggcccagtcagcagtactcttaaacgccaataatgttcaagctgagaaacacatcatcaagaatgcaatcctattaaaaatagccacaccccccaaaaaatgactaggagtatgtctaaccaaggttgtgaactatctctatgaggagaactacaaaataccagtgaaagaaatcagacaacacgaacaaatggaaaagcatttcatgctcatgggttgaaagaatcaatatcaatgaaatgtccaaactgcccaaagcaatctatagattcaacagtattcctattaaatgaccaacatcacttttcacagaattagaaaaaacttctaaaatgtatatgaaagcaaaaaagagctcaaagagccaagacaatcctaagcaaaaggaataaagctggatgcatcacattacctgacttcaaaccatattgcaaggctacagtaaacaaaacagcatggtactggtataaaaacagacacatataccaatggaatagaacagagacccctaaaataaaggcccacacctccaaccaactgatcttcaagaaaatcaacaaaaataaacaatgaggaaaggataccctattcaataagtggtgctgggaaaactggctaaacatatgcagaagaatgaaactggatccctatctctcaccatataaaaaaattaacttgagatggattaaatacttaatataagacctccaactataaaaatcttaaaagcaaacctaggaaatactcttctaagactttggcctaagcaaggaatttatgaagacctcataatatatgcagcaaaataaatgcagcaaataaaaggaatttatgaagacctcataataaatgcagcaaaataaaaaatagacaagtggaacttaattaaagagcttgtacacagaaaaacaaactatcaacagagtaaacaatctacagaatgggagaaaatacttgcaaactacgcatctgacgaataactaatatccagaatctataagaaacataagcaaatcaacaagaagaagacaaatcaccccactaaaaagtgggaaaatagcataaacagacacttctcaaaagaagtcgtactattggccaacaagcgtatgaaaaaatgctcaacaccccgatcatcagagaatgcaaatcaaaaccataatgagacaccatttcataccaggcataatggctattactaaaaagtaaaaaaaaaacaacaaatattgacaaggcttcagaaaaaaggaaacacttttacactcatacacttatgggaatgcaaatttgttcagaccttgtggaaagcagtttggagatttctcaaagactaaaaatagaattacaattcaacccagcaatcccattactggatatgtacccaaaggaaaatagattgttctatcaaaaagacacctatattcatatgtttattgcagcaccatttacaatagcaaagacatggaatcaaccttggtgaccatcaagtggatcggataaagaaaatatagtagacatataccctatggaatattatacagccataaaaaaacaaaatcatgtcctttgcaacaacatggatgcagctggaggccgttatccctagcgaattaatgcacaaatagaagaacaaataccgcatgttctcacaatggcagctaaacactgggtgcacacaaacacaaagatgagaacaacagacactggcgactccaaaaaggaagaggaaggaagaggggaagggctgaaaaactatctatcgggtactatgttcactacttgggtgatgggatctttggaagactaaacctcaacatcacaaaatatacccatgtaagaaacctcacgtgtaccccctgaatctaaaataaatagtttaaaatgaatcaaataaaagtacgtaccaatgtacacaaaaaaattcaaatccatgagacatattctgtggaaaaatgaaattgtttttcctactataatctcagaaaatgcttctaaaatcagatgtggccaggtgcagtggctcatgcctataatcccagcactttaggaggccaaggcaggagtactgcttgagctcaagagaccagcctgggaaatacaatgaaacctcatctctacaaaaaaatcaagctgggcatggtggtgcgtgcctatagtctcagttactccagaggctaaggtgggaggatcacttgagccccagagatcaaggctgcagtcagctgtgatcacacgactggactccagcctggacaacagagtaagagcctctcaaaacaataaacaaacaaacaaataataaataaacagatgtatagttttcccctatgccagcaagcaatcaattgtgcagcagacaccgcctgggtatcctccaaccccagttcagtttcaataccatctacctggagatagtggcaaatcccacaggttgagggttcagtcccacttcgggcgccaacagcaagccccaggttgtttttcctgtgcttttgacagactgactattaatcagggttcctgtaactccctcattgggttcaattaatttgctagacctcacagacctcagggagacactttatgtacatttacccatttattataaaggatattacaatgaatacatatgaagagatgcatacagtgaagtattggaaaaggggttggaacttccatgccctccctgagtatgccaccctcaggaatctccacgtgttcacctaaactgaagctctctgaaccatgtgcttttgtgttttcatagaaacttcatgaagtaggcatgattaaaccattggccactggtgatcaacttaaccttcgtcgcctctccccctccctggtagctgaggagtggagtttaaagccccaatcttccaatcttgccttggatattctggcaactcaggccccatcctgaagcttgttggaggctgccagctatcagtcaatgcatcagcatgcaaaaagacaacacttaggaaactctatagattttaggagctgtatatgccaggaactgggtcaaagacaaaggccatgtgaacaatccactggtagataaagataaagcataccatttcatttcgttaaggccttccaaaataagataaactgaacaaataattgagaaaggggtaagcaacgaaagattatttttacagtagaataatgtgtaatcgaaaggaagacaacagtgcgtatataaagaattaaaccaagccgggcacaatggctcatgcctataatcccagcactttaggaggcacagtcaggaggatggcttgggcccaggagtttgagaccagcctgggcaacatagtgagaccctgtctctacaaaaaacaaaaacataaaaaattatctgggtgtggcagcacacaaccgtagtcccagctactcaggagactgaggtgggacaattgcttaggccaaggaggtcaaggctacagtgagccatgactgtactgtaaccaagtacgctcatttttctaagaaaaagggagtgagttattatttttttctcttattttctcctttccccattttcccctgttccctacttcctacttagccctttagaaatacacttataaccttttacctccccttcagcagacactctctacagggcaagttcatccaactatgtgcttcgagctccagaggggaatctcacttgccaggaggttacctcgagaaacagcaatcaatctacaacccaaagtcctgctacaaaactctctcccacccggagagtttcagccacttttacaacccagttctgcccacgaaggcaccagtggctgccagctcaaccccctggtacgtaaggcacagaagcaagttagggggacacccacctgctcgcttcctctccttagtgccattcatgccaagcccgccttttaaaagcgcctgctttctgctccaaaagcaatgcagtaccttacggcaggaagcctgtacttcttcccctaagctagctttggaataaaaagtcactgtctttctaccagaccttgctcttgttaactggactctgcaagcagcgagcaactgaacctgcatgtcagtgacagagccgccgtgctccggcctcgctccagcaacagggtgagaccctgtctcaaaaaatgtagtaaaagttaaaaagaaaataaaccgcagaatacaacacagctcctgaattccaggaacagaaaatggagcaaagtataaaaattcatttcatatatacacatccacaaagtaatgcaacccactcagactcacaaggaataagaaaatgaaaataaaatgggttgcattatccccgcattttcataatataaaatgaacacagtggcaagtttgcttaatgagggggaaatctgacgtggcattggtgggagagggcacctctgcacctggggtagggatagaatcttgccagatctagcaacacaggaaatgtgccatcctagaagagatcactcttccaatcgtccagcctggaggaactctccacgatccatagtgaagtcggcatggtcacaggcagccagggtggcaccttttttttttttttttttgagacaaggtcttgttctatcactcaggctgaagtgcagtggcactatcatggctcactgcagcctcaatctctggggctcaaatgatcctcccaccttggcttccacaagtgctgggattacaggtgtgagccaccatgcagcaccctgtgtggcattctttatagaagtgagaaagttaaaagatccacctgtcttcattcccagcatgctccaacaaggatgtagaaaagtgagctcctgtttcctaacacgaaaacatgtcaatgttcaaaacttgcaggttaacatatcacaaccaaacattcactgaggaatttgtttaaatctcataatgatgtcaaaatacatttctacaggacttgcactgacccttcccacagaattgagaacagtggctccccactaagatgtgagggagggtggaaggctggacaggaaaagggatgctttacctcttggcacataaatgtatcatttcactataaaagaaatatatacatgatgccatgttcaaaataaaagaaacaaaatgttgactcataactggtaaaacaaaaatacagttccattctctctaatggcaaggttgttctgcttatatgccattctcacctacaatacccgacggacaaaggttcttgtaagaacatcacagtctccatgggatagagcttctgagactagtttaatgaatcttgttacacatttatgttgacgtcatacattaaaatggatgatggaatgaaagaatcatctatctccaatgtcagtgtctaaactttccattctgttcccagtctttacgagtttggagtcggaaatccaatgactcacttgttcggcttcaaatgcagttaccaatgaggcaggaaagctttccccttagtgttcttttctatgccagtgagcaggtacgtgtgcacctgacttcatgggcagcttctgttatcatggtttacacagcgctgacagtgcatccagatgcggcccctgagcaatccctgctgcccaacagcactgacaccacaggaccctcaccccgtctccatccatgtctgggtgtgagcccttcccaggaccatgcccagtgcagcctcttcccaagttcatgtcactggatcacgggagatggaatctaaacgagatgagagggactgagggaaggcgcgggtgagtgctagcaaacatgtcaggcaggacgcttcagactcagagaagattcgcaatgccaatgccaggcatttcaggaagaaataaaagaacaatccaccaggagtatcactttacctgagtaagggccatccctgactccttttctttcctcttcctcttcttccagacttcttccttgggtaacataaaagagtctttagaagtcaatactgaatatccaaaatatgctgcttagggctgagaatctatacatccccttcatgtgccacagtcacacgcacagatctcaccctgtggaaagatggtcctctgcgccccactgcaccagggggaatacggggacgagaaactcctacaggaagaagtgagtttctgacccctttcttcagaacccaccttcctcctggagaagcccacacacactgcagcagtggggagctgggctggactgagctcccctttaggacacagacccagccctgaccaaaccccatgcagaacacagcccccctcacctctctgtggatcccaggctgagctcagccttcagaaacaaaagacagtgattggtactatgctggctacagaatagagtcaactttaaatattactcagctgggctctaaaacactgaaatgaaaatacgtcaagggggcacaagagatgtttctgcaaaacgcctaggcactctaatatgaagccagggttgagctccactgagggggtgagcccagcacagccccaccttctggctctgctctcctgttggggacttgttctcaccaggatccagactggatattgaaggagcaaaaagaatcacacagaacaggcaacatggaccagaggtgggggtgaaggtgggcctgcaatgtcaaataggaggctgtgggagatcacaaacgtttccacggaggaagtgatgtcagaacaaagacctcaggaagaaaggctgcttgtcacttgcagctgagaggccagggagttctaggcagagggccagcccacatggaagccttgaggcaggagcaaccttggctccaggaaaaggaaaggggcctgtgtgactggagcagagggggctgggaggacacaggaaggagatggcgtctgagaggtcctgagggtgcagatcacgcagggagaggtcttcaaacattctttctcccatacgtcaaaaaaatttatgaaaccatgtatttcctcacctgttttaagtaaatgcttaattttttcttcattttacaaagtaacacacttacaacatagtatcttgcatattttaaacatgacaagaagttcagctgagccccaggaagtacagggttgcccttagctgagatgtgcaagactgcaggggtgaatatgtttggaggagtttgggaagtcacttttatttaaataattaattaattaatttttgagagagtttcactcttgttgcccaggctggagtgcagtagcgtgatctcggctcactgcagcctccgcctcctgggttcaagcgattctcctgcctcagcctcctgagtagctgggattacaggcgcccgccaccacgcccggctaattttttgtatttttagtagagatagggtttcgccatgttggccaggctggtctcaaactcctggcctcaggtgatccgcctgcctcggcctcccaaagtgctgggattataggcatgagccactgtgcccagccaagaagtcacttttaggcatatgaaaatggagatgcctgttgggacatccctgtagagagttttggagacaactagacacaggattctagacctcagaggagggtctgcagggtacatggggctgagtattaacaggtggggcataaagccatgagatgagaagtacggaaaggcagtgggtgtggacggagacaagaagaggtgtaaggactgagccatgagcacttgcacattcagagaacaagaaagttctggagacaccagaagaggaaagcagaaagtgatcagagtggcaagaagattgaatagatttgtaaaggttaacggggtgtcataaaagccaagataacagaagaggaagtgatcagctgtgctacatgctaccgacaggaagaaaaagatgaggacaggacatgaattacggcatttaggaattgggaggtcactgatgactgaaaaaggaagaatcagtggaatgctggatgtgaaagctagattcaagcaacaattcaaaggtttaagcaataattgaagacaaagtggccgcacacggctcacgcttgtaatcccagtactttgggaggttgaggtggaaagactacttgagcccaggagtttgagaccagcctggccaacacagcaagatcctgtctctatatttttatttaaaaaaaaaaaaagaattgaagacaaagtaaaactagtttttagaatattatgctcttaaatagagcacaaataggtacttattacagagggaaatgtagttgaaagtatttttttgtcttaaagatggaagagtagaagaaaaaaaggctttatcatgcattggagatctgttcagagaggaaaaaaattgttcatactactctgacactctaacacagaatatttcacctctagtcaccaaaatgtgtgtcattgtccccacaatgacagcttctccagcagactcccaggtagggagtcctgctgttttactcaattctgacaccgtctacaaaacagaatcagacaccacagcttgagggttcagtcgcacaggactgccctcacttcatatgctgtacgctctgactgacctggtcaatgtgcttccctaacactttccttgggtttgaataactagctagcacagcttttccatctggctgttcatctgtgtcctttgcaacatactttataataaatgagtaaactaagtgttgtcctgagttcggtgaatgaccgtggcaaattactacaacctgaggaggggggtcaagtgaatccccaatttacagttggtcgcccagaagttcaggtcccaacctgcaacttgtgaccggcatttgaagtgggggtagccctgtggaactgaccaaccagtaaacagcatctgatcctaattctagctggacagtgtcagaattgagttgaagtataagttcacccagttagtgtcggatggaaaatgcattgctggtgggaagaagttcctccacattttggtgatgagttttctgtgtggagtgttcactattacattgactgtacactattatattgactataatcagcatcatataatactaaatattatgtaatcagtattacattaactcatgttctcgcccctacccaaccccatcccagggaaatggaggaagagcgtggcccacaaatgaatgagtcaagtcactgccctctggctgaaaaggttacaagtggaagctaacctctgatgccataattataaaatgcatagccttatagacaagttttgcaattctcatctttatctgtgtattttaagcatatttaaaatctgttagattataaagacagaaatcaacatgtcacaactaaattacccatattcaatcaactcaccactcacctgaaccaaggtcccctccttcttccttcctgtgtgtttccctctctcattctgtacatatctcatcctcaccttccctccctggctctttttttccgatgtttccccccaggtttctgctcctcattttgagcccctctcctctcctgctctttctccccttcttccctccattccttctcttccccctgttctgctccattcctacaacttcttccacctcttattcctttctgcccaaacttttcattgtcccaatcccaatctccacatatttctgcctctttcttccctcatctttgctccccctctgctccccctattaaatcccctcttccctgttacaccccttgtccccactctctggcacccccagatccaaagccttcccatactgtggttctccctctgctctccttgtcaccagctgtcccgtcttgctgtcccagcaccacattgctgtctgccctgactccaaattcctcctcctctcccccactctctgtctgaggagcctccccctttctgcccctctccctatcttgctgtccttcatctctctggagacccagcttttctctatatttctccagttgctccctgccccacactttctcagctttgtctttcactctcagtgtctgtctgcaaattccccacccatcctctgcgttgccatctgttcatggttctcacccgtccttctcactccttctcagtttttctatttcctctttctcctgtctctctttctcctgatcccctgtggccacatatttacagggaaggggatggaataagatgcccacctactgaaagcacttttcctagtggagtggaatctgggacaaaagaacattggaggtgaacagacaggcccaagtcacctccttcaacgctgggtcagaggaagccatgcttatgagggggaggcctgcaggatagagggcaaggctcaatgagagcaagatgggagggtgtctcaggggaggggtgggatctgtggaatcccaggaccagggcgaggactctcttgcaccggagctgcggtgctgctgtgcagacgcaatgaagggcgaggcttaggggacccaaagggtgaatgcacctcgcgggtgaggaccttacaaggcacagggtgggaagtgagtaaagggttttaagcaggaaatggcatgaaagctctctacatgggctgaaggcagaaatactgcaagcaggacctgtctgtgtggttcaatgggaagtgacccctgacctctcatggacacctctgaatttacttgggaatgaaagagccatgaggggatactaaggtctatagggtccggagtgacggctcatgcctgtaatcccagcacttcgtgggctgtaatcccagccgaagcgggaggatcacttgagcccacaaattcgagaccagctcaggcaacacagtgagacttcctctctactaaatatatataaaaaaaattatttaaacgtggtggtggtacacaccggtggtcccagctactcaggaggctgaggtgggaggatcgcttgagcccaggaggtccaggctgcagtgaactacaatcactcatatatacacatatgtctctgaggactcctgcaaatcgagtctggatgtgcaggagcctgggaagcccaagtttaacctaaacagagggaaactcacgtgtgaggtcttcactccaggtgatcagcttccagtggctgcaagaagagctgggtcccctgtaggcggggcccggggcaggcgcctcgtgcagagaggccaggagttgggaggtgcctgagggatgaagtgggcgggggacttggggaaagggggcggtgcctgcgctcccctccctctcactcccaggagtctgtttccagagctttggaggagagacctaccagcgaggctgaagccactcagtgggctgggagccgggatctctctaggtcgtcagggggcagtgttcggatccaggaacgtttctgcaattaaaattaagcatttaaagaaatgctgtaactgaatgagatgcaaactagaatgtgaaatgcaaaatttgagcttagcagggagtgtacaatttcatgctgatcagcagaacctcctttccatttctattccccgcgcactcaggaaggacagcgtcaacctcggttccagagcagggctaaggcctaggtattggttaggtcaataacttgctttttaaaaagcagtaactttttacaaatagaaataaattccattgttcttcctttatcccattccactcttgagatgacggcctcaaatacctttgagataaactttgtcattgtaatatgcttatgtcaataatctctacatatggcgtaatttgaaattcacttcacatgcattccaaaagtacttgaagaaacggaagagaaaccaaagaacatagattacaatatttaaataaaaattgttttctaagtacttattttaatctgttgtagaaaaaaagcctgtaaaatcatcttcagaaaacatttacatttatattcacctcaagggtaattaattttgcaagattttaagcgtatttgatagggtattttttttttcttttgagacagagtctccctctgtcgctcaggctagagtgcaatggcgcaatcttggctcattgcaacctctgcctcctgggttcaagcgattctcctgtctcagcctcccaagtaaccgggattacaggcacacgccactaggcccagctaattttttttgtatttttagtagagacggagtttcaccacattggccagggtggtctcaaactcctgacctcaagtgatccacctgctttggcctcccagagtgctgggattacaggcgtgagctaccatgctggctggatattctccttcatatgaaccctatacaaagtaaaactagattatcaaatattaaatggcatcgtatctactagcaataattttatggcaacatctgtgaatttacctctactttgaagtatgtttgcctctcacatccccacatgtggaagatttcatcaatggaaaagtggtgattaattgaaaatacaattgtttagacaggaaaaatagcatatttcacaactacatctacagtttcaaaagatatggtgtctgggatagatttggggacttttgcaaggtagactgctctgtgttacgcaatattgctaagtacctatgttgacaagaaagcagtttcagcatggacttccatgatcccaagcaaagaaatgatttgattttggatcttttcattaaattgagaatagtaggggtgaatctgattatagatgaaagccatgaatccattttgtatatgcagagtttaaatgcttatacattttcattgaagcaaaatcaacatattcacaagagatttaaaaaggatatttctggccgggcacggtggttcatgcctgtaatcccagcacttcactttgggaggccgaggcaggtggatcacctgaggtcaggagttcaaaacaagcctggccaacatggtgaaacgttgtctctactaaaaatacaaaaattagccaggcgcggtggcagcgcctgttatcccagttactagggaggctgaggcaggagaatcacttgaacctgggaggcagaggctgcaatgagccaagatcgtgccactgcactccagcctgggcaacagagcaggactccatctaaaaaaacaaaaaaaaagaagaaaggatggaagggggaggcttaacctttgctatctgctaggattacagggtcaaaatcggcttctacattgtcaacacataacaccaagtgaaactcaaaactaatgaacttgccctggtaccttggcctttgagactcggcactgaatccagcctgggcaacatagtaagaccccatctatacaaaaaaatttagaaattatccaggtgtggtggtgcatgtctatagtcccagctattcaggaggctgaagtgagtgtgagattgcagtgagctatgatcgcaccactccagcctgggtgacagagcctgtctcaaaaaacaaaaaacagaagaaaaaagctttgaagggcactcagccttcactgtgggtgtactgaatgttcctgtcacacataagagacatcattaactgctaaaggaaaatttcagctaattgaaaaaatgagatgcaccaacttcatttcaaagccatatacatttaaaattcccttacaattgtgtaatagatcaacaattgaaagataaggaaacaaggcattagtgatgcacatgctccaatgagaccccgatatcatacaaggtaacactccaaactattttatcttccaaaatgcatccgaaagcttcttgatctacaacacaaaatactccaaaataccaaaggtaacccagaaatttatctctgagattttccctataattcctctattttaaaaagtattctttatgtttaagggaatggttggcgacctaaattaccagataccgttcctccacacaccctggtccagggtccttgaaacgcccctggacctaagcccagagttctctttcttccatcccggtgcctggcaaatagaaatggaaacgatgttccgatcgttgtcactatgaaactgaacacagcacaagtagaaatttcaccttcgtttcatcctctaaacagacaaatcaggtcccggattaattaaacggttctaattgccagttccaggatgaaaccactgccccacagggaccatccgctgatgcccctgcacccctcctggtaccctgagctaagatgagttgtgatcctcttaatggtaggatgcctgtctccacctgcaaacaaaatgagtttttcacttaaatcgttttcaatgtaagagtaaaaaaaccttagccttcaattaagtggcccagtaccattctgttcttttgccttaaattgtttgaaatgttggattaactgaaaataagcaggaagcgtccctggactgaaaataagccggaagcatccctgcttattaactgaaaataagcaggaagcatccccggctaatttcaattagctgaaactttattttagcagtgcaatgctgttgatccagtcctagtggagagaaaggctgacatagcagaaaatgacctggggccaagaggagtagagagcccaggcccgctcctttcccggccctgcccgcttcccacagcccaggctgcaccatagcagcttccaccctcccatcccgccgccctcttccagccctttcccgttgcccagaccccagcccagggcgacttttacccttctcaccccaccccttccccactgcccaggccccgcccccacggtagtcccaccctcccaccccaccctcttccacccctttcccattgcccagaccgcaccccagggcgactttcaccctcctcaccccgccccctccccactgcccaggccccgcccacagcagttccaccctcccacacgaccctcttgcacccctttcccattgcccagaccccacctcacggtggcttccaccctccccacctggcctctccccactatccaagacccgcctctcgctggcgacagctccctcccagaatccgcttccagttttctcaccggcaggagagcattcaggcctttcagggcactccagccctgtccaaccacactcggaatccaccatcccaccagacgttaaaatccccaggtgcgctcatgggattggtagcgagtcccagcgtttccgcgggaaactctgagacccggtggctctgcagcttgtctatgatttgaaccctccccttgatttggagactggattgctctttttaatactcccagttggtggctggtgtgcttcccagctgtccgcaggtttgttctcatgagagatgactccagagtgtctagtctttgctttgcataacggatgaggaatacaaaatgtcttaatcttatgaatatataaattgtctgtttatgcacaatgttcagtcgtttattcactcatctcccgtggaatcctaagcacaattataaaagagtcacgttacatgagatcagcgtctaacacaaagcttctgtctcaataacagtaaataataatagcaacattaaatgaaatattagtattgctaaaatgggagtgtagtaaaaattaaataagtaaataattaaaaggaaatgatatatggtcaggtgcggtgacttatgcttgtaatcccagcactttgggaggccgaggtgggcagatcatatgaagtcaggagttcaagaccagctgaccaacatggtaaaaccctgtctctactaaaaatacaaaaaaatgacccaggagtggtggcacatgcctgtagtcccagctactccagagggtgaggcaggagaattgcttgaactcaggagacagaggttgcagtgagctgagatcgcaccactgcactccagcctgggagacagaacgagactccgtctcaaaataaataaataactgaatgaatgaatgaaatattaggccatttttatggtcttcactttgggagactgatgtatgcaggggtggactgcatgtttgtccttggggtggtctttttcgtgagaagggagctgagcaggactaactgaggggcagagccaagggcccttcatggagaccactctgcttaccaacctgtggaagggcaagcgcaagtccacccagaaacacatctggctgactatgggatccctgtctgaggctcagcagacccacgtggccaataaaagaccctaaattctgcaaaaagaagagtttgtctctgtgcccaggcccctccatggaaaaaaggtcctggggtctaagatttctcacttggcaatgatgttggcttgaatattattcacagacccagatccttgggtcttgcgtggggcaaactgactgcagaactgcaggaagtgagagtctgaacagagcagcagaaaggcaggcaggagacctgagggaggggagaaaggagagagacaaacagaccaacccgtcctctccctcaatcacccgcctggggaagcattagtttcccatcatagagaggacaacggggaaagggagaagcgtgtgcataggatgagatgtgtgttgggtggacagaaagactcctttccctaaatgtgaccccattagctcaccccattctattgcacaaattcctgagcggaggggcaccctgtggggatgaacacagctcttcctgcctccagttcctgcgtctccctgccatgaccagggctgtaaccctccaactcccttcccagggccccgtggcccctctgcactggagaaaggtccatgttccacagcgggtttcaaggaccttgcccctcagctccccagctgccttgtgactctgtgactctgttatcttggaataaacagggagaggccaccggcctggctgcaagaatgtggcagctttatcttcccaaggacagtcccagtggaagcctttgggccgcaggtcagtgtgctgtgtttcactctgattcttggagaaatctttcccttactctgggaccctgataatcactccctcttgagttgcacccacagacgcccccacaacaaaccctccctaatgaaagccatctgcgcctgattcttaggatccccgttgccctctggactcagacacgcttacaaactcccacactccccatatacttcataaagatcccacaatccccagatacttcataaagatccagaagccctgttatgaaatctcacaagccccagtaactcatggaataatatacacaaacaccccaggaactcactgacccagggcaacgtatttccactcatagtgactccaccccacaggggaataccactgaaacctaccaataaaacagagatgtctctaatgatgcaattagaccccaacatcaggaaaggaaacactccaaatgatcatttcatcttccaaaacacaactgaaagcttattgatctgcaactgaaaataccccgaatgccaaaggcaacccagaaaataatctctgagattcttcctatctttcctctatgggtttcaggatggtttttgcacttcccaaagcctccacagaaatcaccccgtggagcggatgctgtggagcagctctgggatccacaccctcaggccaaggcgcccatcctcctgctgctgaagctccctctgggctcagcttaggtcttggttctaagtacacttcgggatgtttttctctgcctgattccactgccttcagtcctcttcactgtgatgatgagtttccgaattaaattcctgcatgcaaatctctgtgtcagcatctgtttcccaggtaacctgagctgagacatcagggcattacaaaatgatcctgcagccccacaaccaccccaaaacccacttccaggtgctacagccagacctgagacttctttccaagtgtgccacacatcccgtgagcccacagtcacctgtgggccaggtgcatgcagcattcatccagctcctctagaggctcagcattgcttccacgcctcactccacacctctaaggacttcttcacctgtccccatttttctacttctcttccagcctgagaagcacactggattgaaaggcctctggacacaagcgatgcggcaggaatggacacaaactgctatctgcaggacagtgggcctcaagtctagattctagaagttggccatgctggaaggaattgcccccaatttggggacaccatggaatccagtttaaaggcaggtgaagattggccggattgagctggcggaggatgtccaagaaaaagagaggccccagatctcatgagggaggctgccattgtccccttgtctctccactcacagtcccctgcaaaattcccccgctgtttagggagtgcctccttcatggcccacttagcttctgaacttctcgccacccttcctgaagggaatccaggacccctgactgcgagcgcatcacctgctggaaggcaaagcccctgcccaggatggccaccgggccccggtgatgtgtagagcgcggaagacccgggagctggagtaaggcggtggggacgcctcggcactggctgaggacacagggtctgcggggcttttcaggcctcagtgaggccttctgctcttacatagactggaataaatagccacaggaagtttagaccaattacggatgaaatttccagaatatgagaccatcctcactacccgccctatccttttggtcttccctgaggactcctcagcccgaccccagccccagcatctgaaccacaaccccagagcaggtgctgcagtcgtcccgtggccaagatggagacacaaaacactcaaaataatccatgcagaagagtgtccgatgtggtgatggatgcggagacagtgaaacctgagtaacgtggtagagactgacaggcagagagaatttcagatgggggtgcaagagggtggaagacagctctgaggctagacccgaaggagaagaaagggacagagctgtgatgatttggggacatagggtaagaggagggacaaagactgagacaggaaaggttttgatgtttgggaaaagagaaaaacaaatgtgactagggcagagggagtcatgagatgagggcaagctcccaggaggaggctggacactggcaggggccctggacgcagggctgtggagccacagtgaggagttgggcttttgtcctggggaacacgggaagccggtggagggttccctaccagggactgacatgactgctttagatttagccataactctaatgcagagaaaggcctccaaagatggtctctctgcctctgagtctacaccccagcttccatccttgtggttttggttttgttttgttttaaattttaaaggactgagtcccatttaaatttttaattgcagtgggcactccccaattcctagaagaactgcaaaacacagatgtacacccaattctgccaaacattaaggggattagtattgcccagactgaggtatattgactgagtccctcaccttcacgttgcaggtggatttactgagggctagacggggagatgtttcactaagtcatccaagttgaattagaagatgtatctgactctatgacggcctcgaagggctaatgggcaacactagactttctcacgcctcccctggaaaattccaggatcttctttcacatacctgggcaaaagaaacttccctttcatggctttatcacattgatcccaaacatttaattcctcttttccagaaaaacacaacatactaatgaaacgcagaactgtgaaaacatggctattggtgttgaaaacagtgaaagactgtcagctatagagatgagctctctcagcaaattttttcatgaacacataagctctgctggaataaggttttgagtcaatccagcccatctttccacatttacagaaaatagaactgacaaaagggacttgagggggacatctgcttagtagttcacaggtcactattttaagagatgacataagggaagaaaactgactagtaacaaataagttggccgagcgtggtggctcacgcctgtaatcccagcactttgggaggctgaggcgggtggatcacgaggtcaggagatcgagaccatcctggctaccatggtgaaaccccatctctactaaaaatacaaaaaatttgccgggcgtggtggcggctgcctgtagtcccaactacttgggaggctgaggcaggagaatggcatgaacctgggaggcggagcttgcagtgagccgagattgcaccactgcactccagcctgggcgacagagcgagactccgtctccaaaaaaaaattagttaataggttcttatgttaacgttaaaaaaaaaagcgtcactgatatctttaccaaatacacattcataccatctaaaattcctactgatggccggcgtagtggctcacgcctgtaatcccagcactttgggagggatcacttgagatcaggagtttaagaccagcctggccaatataatgaaaccctatctctactaaaaatacgaaaattagccaggtgtggtggcaggtgcctgtaatcccagctacttgggaggctgaggcaggagaatcacttgaacctgggaggtggaggtggcagtgagccaaggtcacacgagtgcactacagcctgggcatcagagtacctccatctcaaaaaaaataaataagggccaggagcggtggctcacgcctgtaatcccagaaatttgggaggccgagacaggtggatcacttgaggtcaggaggtcaagaccagcctagccaacatggtgaaatcccgtctctactaaaaatacaaaaaattagccaggcgtggtggcacacacctgtaatcccagctagttggaaggctgaggcaggagaatcacttgaacccaggagacagaggttgcagtgagctgagatcacgccactgccctccagcctgggtgaaagagcgagactgtctcaaaaataaataaataaataaataaaaatgaataaagttacctactgactaccaaagagtatttccaatatatgataaagagtagaaagcatgcagacctcaatctgaactcaacacaattaacttcaaatggaaaccattttgaaaatatatatattatttaatatgtatatgatatattaactatatatggaattctacaaagggaaaaaattgaaaatatatcacatttagaaaagaatgacatgagccaatacaggattccacaaaagcttacttcagcaataattacatatagaaaaagagactgaattagataagcttcatctcaaccttcagcatgaactgtgagatgaaaggtaaatacaaggcaccaggcagtgacacagccagtcactccttgcctctcttcactgcccccaccctaccccatcctcggaaacaggaagagggagacccataactgaatgaggcaagtcactgcccaatggctaaacagcatgggcaaatgaaagctagcctcttatgccataattgtaaaatgcacaagccttttacacagagctttgtaattctcatccttatatgtagaatttaaacaattagattacaatttaaatgtaacacattataaatagagaaatcaaattgtcatatccaatctcaactcacctctcacctggccccagggcgcccctctttctttataactatgtgttcctctcccccattttgtgcctctcactttcaccttgtctctccagcctttttccccttttatcttccccctaggattctgacgatgttgtgcctcttttttcttctgctgtttctcccttctttgttttttccccttatatctgttctactccattcttccaatttgtttcacctcttgtggcgttttctttccaatcttttcatcgtcccaatctccatctatttctgcctctttcttaccccatctccgcgcctcctctgctctccctgttaaatcccctcttccctgttacacccgcttatccccactctctggcactcccagatcccaggcctccctgtgttgtggtgctccctctgctcgccttgtcaccagctgtcccctccagctgtcccagcaccacgcagctctgtctgccctcggccaaatcctttctcctctcccccactctctgtctgaggaggctccttctttgctgtccctctccttatcttgttgtcctgcatctcgggacatcgagcttttctctacatttcgccaattgcttttctgcccctgctactttcttgactgcttctttcactctgtcgctgcaaatctctcacccatcctccactttgccatctgtttatgggtctccctcatttttcttttctctttcttggtttttccatctcctctcagtggctctttgtctctctttctcctgattcccttgggccacacattcactggagggtttgtagtaagatgtctgcatgttggaggagtacattttccagggggtggagctgggcaggcaaaaacaccgggtgtcacaggacgggccccgggcacctccccaacgagggctcaagggaagcggtgactgcgaaggggaggcctggggagcagcagggcccggcacgaggaggagggaggtggggggcgacggcgccttaggacaggggtgggatgtgcaggatcccaggaccaggcggaggcgcggcctccccgggactgggtcggcggcgctgcgctccaggggccgacgagagcgaggctgggaggcgcccagggcaggcggtgaggactttaagcgatgcggggcgggaggaggagtcagtaaaggattttaagcaggaaaatcctgcttaaacgtttaaaaaaccgggaaaggccgtgtttacttggcccaaggcagaaagaccgggggcagggaccagcctcagggcgactttaacccaaaaggaagcgtctccgggcccacacagcaaggcctatttacctgaggtggagggtgcggtgcggagattttaagtccgtagcgacccccgggcatcgggtgtgcgaatgggggacggcgaggcgcaggttgagtctacacagaggaacactcatacgccatggtgtgatgcttgctccgcacgatccacttccgggtctgtgggcaactgcgcgaaggaaagcgaccgagcggcccggggcggggtccgagatgggcggaaccggaaaagggcggggcgttgagagagccgggctgaagcaggggccgccaggcagggaccccagggaaggaacggggaggagccaccggggaggggtggggagtgaccaagtggagggacccgggggcgggccggggaggagccgccggggaagggcggggaggaaccgcgggaagggaccgcgggggaggaaggcgaagggaccgcgggggagggaggcagagggaccgccaggaagggacccgggggagaggcggggctggacgggacacgttagggtctgcgatttcgtgtgatgcccacagcccagcgcccagagccatctgtagtgtcttgtggaacggcgtagatgtttcaaacggtttcaagttaaaagcacagttgtgtaggttattttggaaaccaaactgctttcctcttagaatggaggcggtttatgttgaaagcattttttgctagcgcgtttacccagtaatgttattgacgctgaagcagcccaggagtctgggaacatgggttgacacggagcggtgatggcatgctggaaaagtttctgcgattaaaattaagtaatttaaaagccctgaaattagcagtaacttttaaaaaatagatataaattgcattgtccttttttatacttactattctattccgtgcgagatgacaacctcaaacgcctatactttttttttttttttttgagccggagtcacgctctgtcgtccaggctggggtgcagtggcatgatctctgctcactgcaacctcggcctcccgggttcaagcaatgctcctgcctcagcctcccgagtagctaggattacaggcgcccgccaccacgttctttagcggagatgaagtttcaccatgttgcctaggctggtctcgaattcctgacctcaagtgatccacccgcctcagcctcccaaagtgctgggattacaggcgtgagccaccatacctggccccaggaactactttcacctactgaatatatattaagtcctttgccacaaaaagataatatacataatttatctcagaacaattaagatatttaccactgtaaatgacaaattcagacttagagaaggaagattttattcaaaaggactattgcaatagagagaatgttccaatcacaagatctgaaaatgtccaagagacacaaactaaaaagcttttttttctttttttcatatatggaggagtaaacaaggctagaaagcacaagcacaagttatgaggctgtggatgagcacttggcatgactacagttattcagggaaagtttgttatgttatgttatgttatgttaaaaatgttacatatttcttggagagagtcttgctctgtcacccaggctggagtgcagtggcgtcatctctgctcactgcaacttttcatctaccaggctcaggcaatcctcccacctcaatctccccagtagctgggactacaagcacacgtcaccatgcctagttaatttttgtactttttgtagagacggggtttcgccatgttgctcaggctagactcgaactcctgagctcgagggatcccccacaccttggcctcccaaagtgctgggatcacaggcgtgagccaccgtgcccggtctatttattttttgagagagcatcttgctctgttgcccaggctagagtgcagtgtcaagaccatagctcactgcagccttcaactctggaatcaagtgatcctcctacctcagtctcccaagtggctgggactacgggtttgcaccgccacactccactaatttttttactttttgcaaaggcggattctcactatgttgcccaggcaagtcttgaacttctagcctcaactgatcctcccgccctgatctcccaaagtgttgggattacaaatgtgagcctggctcatcatggaattcaagaccagtttgggcaacatagcaagactcccatctctacagaaaatttttaaaaattagctgggcatggtggcacacacctgtagtcccagctactcaggaagattgcttgagcccaggagttcgaggcagcagttagctatgatcctgacactgcactccagtctgggcaacagagtgagaacctgtctttcaaaaaaaaaaaaaaaagcctactcttgggaggggctgttggctgttgttaaggaaaagttgttccaaattacactgacaaagaatggttcagagggttgggcatggtggctcacgcctgcaatccttgcactttgggaagctgaggcgagtggatcacatgaggtcaggagttcgagaccagcctggtcaacatggcgaaaacccatctctactaaaaacaaaaattagccaggcgtggtggtgcacacctgtaatcccagctactcaggaggctgaggcaggagaattgcttaaaccagggaggcagaggctgcagtgagccgagattgtgccactgcacttcagcttgggtgacagagcgagactctgtctcaaataaataaataaggctgggcgcggtggttcacacctgtaatcccagcactttgggaggttgaggcgggtggatcacgaggtcaagagatcgagaccatcctgaccaacatggtgaaaccccgtttctactaaaaacacaaaaattagctgggtgtggtggcctgtccctgtagtcccagctactcaggaggctgaggcagaattgcttgaaaccaggaggcagaggttgcagtgagatgagatcgtaccactgcactccagcctggcgacacagtgagactccatcctataaatgaatgaatgaatgaattaataaagtgaattagttatcaaaaacctcaaaaaagaaaagtctgtagctgggcatggtggctcacacctgcaatcccagcattttgggggaccgaggcaggcagatcccttgagatcacgagtttgagaccagcctggccaacatggtgaaacgttctctactaaaaatacacaaattagccgaacgtggtggtgggcgcctgtaatcccagctaccttggaggctgaggcaggagaatcgcttgaacccgggaggcggaggctgcagtgagctattgtgccactgcactccagcctgggcaacagagcaagactccgtctcgaaaaataaaaattaaaaaaaagagtgatacagctttcatggtgtaaaataactttcttgggattttcattatattcacataagtatcctgaggcagggtatgggcggggagaacaactcaagtgcactctgtaagtgtatgttcccaacactctatttaattccaagaaaaaaaaaaatggttctatctttcagccttaagagtctaatggtgtgttgttattgtctgttacaaagtaacctactgaggtgggataaaactatgttggcagagagaacatgatgcattcatagttatgcaaaaatcagattaattagcacgagatctatgatacattctgaataaaacagtagcaaaatgtaataccagcagtaaatgtgaatcctaatcaataacatgctattgtggttcatctctgaggttgtggtttctattgtggtttcaatcttggctatataacagcgatggccattccatgcagaaggtggccaccgttttcccctgaattatttccaccatgtaatcagtcactaataacccattacactcctcccacaaatcccagtgtctaaggtcttgatctgctctgattttttttgaggcacagtctctctcagtcacctaggctggagtgcagtggtgcaatctcggctcactgcaacctccgcctcctgggttcaagcgattctcctgcctcagtctcccaagtagctgggattacaggcgcccaccaccacgcccggctaatttttgtatttttagtagagacggggtttcaccatcttggccaggctggtcttgaactcctgacctcatgatccacccacctcagccacccaaagtgctgggattacaggtgtgagccactgcgcccggtcgtggtctgctctgtttcatggtcaggttgcaggtcatctctttcctgtaacccaaagtgccgtctatcaggagaacaccctaaacacaataaggatgatgatcaacaccatcattttgcattattctctgcctgcccccatgcttggtaatttgccaaggcagagtccttattcttcaaagaatctgaatagaaatgatcctcatctaatgcagtgagcccttccatcttactgattctttcccagacattgccatgaaaggcaggtaaggaggcctatcaacacatttcaaggttttggttgaaagtcataaatcctaaagtataaagtagtagccttgcaagacacctaaaataaataaataaaatattttaaaatctgagacaaccagtgacttcaaacatcctgcaacctttaatatatatcatgttgtgtgagttttaacatatttgggcttgcatttgttctacaatgtgtaatatgaaaagtttatcagcacaactagactgaattattcctcacataaatccttggatgtgttacagttttgatccttggttaatagcttcaacatgcacaaaatatacaaagatgtttacacattttgatgtctagtgagttgtgagacctaaatgaagcctctgccacacagttaggtgtatatgatttctctttagcatggactctgatgtcaatgaatgcttgaacttgtgatgaagggtttgctgtactcgtaaggattctctcaagaatgaaattctctgatgctgtgtaggagtgaattgtgactgaaaaccttgccacatttattatacttgtatggtttctctctgatataaattctttgatgactcacaggatttaaactttgactgaagaccttgccatattaatttcttttataaggtttctccttagtatggataatttgatgtctgaagaggtttgggcgcacactaaaggacttcccacaatcactacatttgtaaggtttctttccagtatggattatctgatgtctagtgaggtttgggcgcacactaaaggatttgccacactcattacatttgtaaggtttttctccagtatggatgacctgatgggtagttaggcttgaatgcacactgaagcctttgccacattgattacatttgtaaggcttctctccagtatggatgacctgatgggtagttaagttcgaatgcacactaaaggctttcccacactcattacacttgtaaggtttctctccagtatgaactctccgatgactcgcaaggtgtgaattgtaactgaaaaccttaccacattcattgcatttgtaaggtttctctccagtatgaattctccaatgccttgcaaggcttgaagtctgactgaagactttaccacattcattacacttgtatggtttctccccagtgtgaattctctgatgagttgcaaggcttgaagtctgactgaacaccttgccacattcattgcatttgtaaggtttcttgccactatgaattacctgatggttggtaagtgttgacctcacactaaaggctttgccacactctttacatgtgtaaggtttctctccaatatgagttttctgatgtagtgcaaggcatgaatttcgactgaagaccttgtcacactcataacatttgtaaggtttctctccagtgtgaactctccgatgtagtgcaaggcatgagttgcgactgaaacttctgtcacattcattacatttgtatggtttctctccagtatgaactctccaatgacgcgcaaggtttgatttttgactaaagaccttgccacacagatcacatttatatcctttctctccagaatgacttacctgacgtacagtcatgtgtgagccatgattcaaggctttgtcgcactcaatatatctgtaaggtttttccctaatgcatgatttctgttcttgtgtgagtaatgaagaacagatgaaatcagtcccatatttattagaaacatgggttttgatggtagaagaaattatttggggtggtgaaactgaggaaccatggttgacagacttctcaacatggttacattcataaattttcccttcagcttgaaactgctgcagttcatggggatgtggtagaaagcttaatccaagctgatgtttaatagacttgtttcctatacctcttctatcgcgttggtctctcctacaagtaagattttcttttggggccgtagtcactttgttgcaatttctttcatcatctctccactgacagtcaaagtcgtgtatttttttcttgatttccctgaagcaaaactcttcaatgtcatgtttttcatgttgttccaatgtcactgtgtggaatacttctcctgggttaccttcctgttgtggtgctagttccttgattacacagttacgagacagatctataagaaatgaaaaccataggtttccaattaattagagacagtatataaatatttcatactgaataacagaattacacaaaaagcaacatttatatacaacagagttataaaacttcccaatcatgatctttaatttttacgaacacaaaggaatcacattctttagtaaaaaaagggtgattacatggcattcaaataaattctagggaaggacagattcaaacatcctatgaccaaaacacattgtacaaacctacgttagccctgaaaggagtattttttcaccttgacagcaaagtacacaccaattggcagaaaatacatggctgtctcattattgaaataaatattacattttacctagccacagcatatttactgtgcccatataaatgaaaaaagtactacacaatatatcataatggtaactaagccacaacaaacttacggaataagtaagatacataaatgataattctgaattgcaaaacagtaatagcactgagaaaacgagacaaaaactaataaaacactgttaaaaatagctaatttttctgaatacctgttatgaaaatatctgtacccacctagaccaggcatttttgacattaatgagtgatgcatgtcagttatattgcatgaaacttactaaaaacccatcatctgtaaaccataacaattaattaataaaacactgtagtaacccatgataaaaatgcaaaccaaaaactagtaactacacttgtacaaagttatagcctgtaaatgattctctcctaagaaaaaagcaagaactatttcagaaccagcacacaacctgtgaactggaatatatgttaagatctctgacatttgatgcatgaggtcaggtaaacacatagcattataaagaagaattgaagaacaaagtcagaaatcacaattatgacttcacacctgcacttatgtaacaaacagccagtcaataacgcaattccctacatatgcattgccctttcatgacctagttcatcagccacacaatatacataagagtttgtacttggaaaatttattaactgaaatcagagaacacaatgtttaaaacgaattgaaaataaaatcaaacaaaatataatgcagtctctacggtctgaatatgttggccaaaattcgtatgctaaggtcctatcctccagtgtgatgttgttgcagatggcgcgtttgggatataattaggtcatgaggttggactagtcaaaaataggattaatgcccttacaggacaaaacataagagcttgttttctcttgccctttccatcatgtgggacagtcagcgagccagtaccaggaactgattcacctggctccttaattttgacttcccagcttccaggtctgggagatataaatttctgtggtttagttctcctagcctatgatatttctttttttttttttttttttttgagacccagtttctcttgtcacccaggctggagtacaatggcgcaatctcggctaactgcaacctctgcttcctgggttcaagcgattctcctgcctcagtctcccaagtagctgggattacaggtgcctaccaccatgcctggctaatttttatatttttagtagagatggggtttcagtatgttggccaggctggtctcgaacttctgacctcaggtgatctgcccaccacagcctcccaaagtgctgggattacaggcgtgagccactgcgcccggcccgcctatgatatttcttatggcacgatgagttatataagacagaaaaaggacaatctcatcacaatcatcacagaaggctgatcaatcttattaaacaaactttgggactttactgtaagacatgcaatattccaagtaatcacacaccaccaccttgttttaaaaactttcaagtaaattgttattatttttcaaataaacacattaggcccatggtattcatgtatctaacctaaattttcacagaaaataagagagaaaaacaagactaaatcctgggccagcaggctcagacttttttttatttttatttttggagacacagtctcgctcttttgcccaggctggggtgcagtggtgtgatctcggctcactgcaacctccgcctcccaggttcaagcaattctcttggctcagcctcctgagtagctgagattacaggcacctgccaccatgcccggctactttttttgtatttttagtagagaaggggtttaaccatgttggccaggctggtttcgaactcctgacctcaagtgatccgcccacctcagcctccaaaagtactcggattacaggcgtgagcaaccacgccgggccatcagacgtgtttttaagcacatgtccacccacaggcagtgtggaaaacctgggtggacatgtgcagtgtggaaaactatcagtcacagcaagaatgcacccaggcgaggagcatatgaagaaaaggagctacaagagctgggctgtgttgataatagtgttattcagtcagctctcatggaaggcagctatgctcaccactacaccaccaatgcatctagtcagtcagctctcatggataatggtatctgagtcatcacttcctacacatactgatttaggcagatcctgacttataaagcggttgagtagtgtcttgtcttgcatagtgagagtagtgtggagggtgaggaagtcctgtggcaattggggttttcaggaatacaaaaccaatatgctaaaaagcaacagtatattccatgcagatcaaggtatcatgtgaggataggagagaggaagggcaagagcacaggagagggagtaatgggcatgtcagaggaaaatctgcatgcacatgtgtgggatataattccactaggacagttacaattctgaccttggggccaggcgtggtggctcacgcctgtaatcccagcactttgggaggccgaggcgggtggatcacatgaggtcgagaattcaagaccagcctgaccaacatggagaaactctgtctctactaaaaatacaaaattagccaggtgtggtggtgcatgcctgtaatcccagctactcaggaggctgaggcaggagcatcgcttgaacctgggaggtggaggttgcggtgagctgagattgtgccattgtattccagcctgggcaacaagagcgaaactccatcttaaaaaaaaaaaaagtatcataaaaaatacagaatttacgactaaatgaaaaagatgttcatttataccacatgtaaatgtacaagatgaaactagtagtggcttaaacaaatgacactggactttaaaaaccgaggcattggccgggcgcggtggctcacgcctgtaatcccagcactttgggaggccgagacgggcggatcacgaggtcaggagatcgagaccatcctggctaacacggtgaaaccccgtctctactaaaaatacaaaaattagccgggcatggtggcgcacgcctgtagtcccagctacacgggaggctgaggcaggagaatggcgtgaacccgggaggcggagcttgcagtgagtcgagatcgcgccactgcactccagcctgggcgacagagcgaaactccgtctcaaaaaaaaaaaaaaaaaaaaaaaaaaaaccgaggcattacagcagtgtaaagcaaaaaaagaacaaacgaaaaaaaaccaaggcatcattcagcttcacaagctccctccacaagagggaggtttgaacctacaacaaattgaacccaggctgaacaaaggtttgttgatgagaatgaacaatggtgcacacaggatggaaaatgaacaaatgtggtgtgaacaatagtttagtcaagagcctcatacatatgatgctgtgaacttgaacaatgtcatcgctaggagaaactcccacaccaactgctggcttaggggagatgatcattagtttatgtgtccagcgctgtcacagtgccctccaggtacacttttgtgaggctcctcaaaactagaaggacatctggacacacttgtcagtcaggctcgcctgatattttgtatcttatatcctgagccatgctgacaattctgctgaacgctttaaggggcatctctacatgtagcaggatgctattcaattatattaaagagttttccctcataaattttctgttatcatataaacaccctccacaagagactccaggagaaggtatgcataacctataggttggttatcatagcaggaatagagaaatgacagactccaggagtgtgtatatcaaaagctgggtttgtttttttttgaaacggagtctcactctgttactcaggctgtagtgcagcggtgccatctcagctcactgcaacctccgcctcctggggtcatgtgattctcctgcctcggcctcctgagtagctgggattacaggtgcatgccaccacacctggctaacttttgtatttttagtagagacggggtttcaccatgttggtcttgaactcctgacctcaggtgatccgcccacctcagccacccagagtgctggaattacaggcgtgagccaccgcacctggtcaaaagttggttttcagaggaaaaatcatgcaaacttaagagaaaacaaaatcaggaagagccaaggtttttccacattcatatagcagtgagaccaacggaaaagagagaaaaatacaacatatgaggctagattttgaaagatcttgagatgggattgtctgctctgcctacagagggatcctaagctaagagcctgaaagactaagacgtactccctgtgtaggacgggggatcccagtgaagacctgtcaactgttcttacagttctgcagagtaacaatcccagaagaaccaactccctcccctggtccacacacccacgaactgtggcaaaagcagaacagaagaaatggctgagggaccacaacaggtagaaagggcttgagacagctccttgcagctccccggggcctcagatgcaaagaaggagcagccagtgtttcccatcttgtgggcaggtcttccaagcaccagaaatggggtggagcatggatagctccaggcatcaggactgtggaggcctcccctctgatctatatggagagcgaactgagcatcaggtggcatcaagaacaggagagaccggccgggcgcggcagctcaagcctgtaatcccagcactctgggaggccgagacgggcagatcacctgaggtcaggagtttgagaccagcctgaccaacatggtgaaactccgtctctactaaaaatacaaaattagccaggcatggtggtgcatacctgtaatcccagctactcgggaggctgaggcaggagaatcatttgaatccgggaggcgaaggttgcagtgagccgagattgcaccattgcactccagcctgggcaataagagcgaaactccatctcaaaaaaaaaagaacaacagcaacaaataacaggagagaccacgggagaagtagacccttgtgatgtggcccctcccggacccctcagagtgaaggagccagagagttcacggaagtcagagggcaatgctgtccatcatgatgagcacttccatttgtctctgtttgagctgcagcccccactggacagcaaaaggatcaactatgacacgtctcaagagcagagggagaagtaggggaagtttaaaatttcctctaagagctcacaggatataaacatttgttttcctacagaactctcccacttgctaagagtttccaaacatagtgtaatggtgtggcttcctctcccctcatctgaggtcttacctgttttcacacctttgatccattcccacccttttggttttcttgctactcgtacttggctttctatggtccagggctctttcctgtgctcccacataggataatactctggtcaggaagagaatttcccgcttataaaatgaatggaacatgatgtgctgtggcttttcaagaatctcagccctttgcttggataagaagagaggctatcacagatggatctaggaaaatatttcacaaattatttcactgaatgccaactctgaatgcttagggaagactgtaatatgcaaatatctagctcccttccaagaactactgaatcaaagcacaggggcagaaaacaagaagtgagtatttcagaagtctaccataagctttcatggatacttcagctctggaaccaccactgttgtatcatgaaggggtcagaaaatctggaaaaaggggatggttaaactccagagttcacattatggagcttttcatttcagagtcaacaaggcctcaaactcagtcaggtaatgcaggggctcccaagaggcacacaagggaaaatggaaagataccaagggcagattttgacttctggaagaaaattatcctcacccagggagaccaggttcctgtagttctccaacatcacatccctgtataaagtcctctgtgtagagttcaggcatttccactcatcttgagagaattcgatggccacgtccctgaatgtcaactgtccgtaaaataataaacacatttcaccaagaggttatgaagggagttaccatcttcacacaaaataagaataaaagagaatttaagtatagatttaattgaagtgtgtgttctgataaatccacactaaggtatttttgagtacatatctctccctaattgtggttttttttctctctttttttttttttttggtttgagacaaggtctcgctctgctgcccaggctgaagtgcagtggcatgatcatggctcactgcagactcaatctcccaggttcaagtgaccctccaaccttagctttccaagtagctggactataggcatgtgtgtacaaagtacatttgaaaacttcaacaatgaactagggatcaagcaaaagaaaaaatttcagaacttgaagacaggtcttttgaaataaacgagtcagacaaaaataaagaaagaaataaaaaagaatgaacacagcctatgtgacatatggggcaggcaccataaggtgaccaaatatttgaatttttggtgtcccagaaggtggagagaaaatcaaaaaagatagaaagctatttaacaaaataataaccaaaaacttcctaagtatagtaaaaggtttagatatctagatacaggaatttcatagattctcaaagagatacaatccaaaaatgtcttcttggcacattatagtcaaactgtcaaaagtcaaagaaaaagaaagagaattcggctgggcgtggtggctcacgcctgtaatcccagcactttgggaggccaaggtgggcagatcacctgaggttgggaggtcgagaccagtctgaccaacatggagaaaccccatctctactaaaaatacaaaactagccgagcgtggtggtgcatgcctgtaatcccagctactcgggaggctgaggcaggagaattgcttgaatctgggaggtggaggttgcggtgagccgagatcacaccattgcacttcagcctgggcaacaagggcgaaattccgtctcaaaaaaaaaaaagaaagaaagagaattctaaaaaaaaacagcaagagaaaagcatctagtcacttataaagggtgctccataaaacaggaaatttctcaatagaaaccttacaggccaacagagaatggtatgatacattaaatgtgctgaaagaaaaaaaaaccctgccagccaaggatactatactcagcaaaattatccttcataaaaaggagaaatagtctttcccagagaagcaaagcctgagggaattcttcaccactagactggccctacaagaaatgcttaagggatccctacatctagaagcaaaaggacaatattggccgtcatgaaaacacacaatactataaaacccactgttagagcaaacatgcaagtaaggaaaggagtcaaatgtaaatgttactattatagaaaaccaccaaaccacaatgaaaaacaattagagaaaggagcaaacatacaaaacaaccagaaatcaattaataaagtgacagtaataagccctcgcatatcaataatgaactttatgtaaatggattaaactttccacataaaagatatagactggctaaattgatacaagcgtgtaacccaactatatgctacctttaagaaactcatgtcaatgtaaagacacaaatagactcaaagtgaaaatatgaaaaaaggtattatatgcaaatgaaaccaaaagcaagcagaagtacctctacttcaatctaacaaaatgaattttaagttaaaaacagtaaaagagatgaaaaaggtcattatatactaataaagagatcaattcaataagaggaatataacaattctaaacatatatgcacccaacactggagcatccagacatatagggcgaatattattagatttaaagggagagacacaatccaaaaataataatagttagggatttcagcattagacagctgatttagacagaaaattaacaaagaaacactgaatttaaactgcactttagactaaacagatctaagagatatttacagaacatttcatccaacaagtacagaatacacattctttgcatcagcgcatagaacattctccaagacagactacatattagaacacaaaacaagtctcaacacatttttaaaatatcaaaatcttagtatcttcttagaacaacaatggaataaaattagaaatcaataccatgagaaactttgaaaactggcaaatacatggaaattagacaacatgctcctaaatgaccactgggtctaggaagaaattaagggggaaattaaaaaaaaaaaatcttgaaacaagtaaaaatggaaacacaatatgtcaaaacctatggaatacaacaaaagcaatgctaagagggaagtttatagtaataaacacctacttggaaaaagtagaaaaatttcaaataagccaggcacggtggctcactcctgtaatcccagcactttgggaggccaaggtgggtggatcacctgaggtcaggagttcaagaccaccctggcgaagatggtaaaaccccatctctactaaaaatacaaaaattaggccgggcgcagtggctcacgcctgtagtcctagcactttaggaggccaaggcgggcggatcacgaggtcaggagatcaagaccatcctggctaacatggtgaaccccgcttctactaaaaaaatacaaaaaaattagctgggtgtggtggtgggcgcctgtagtcccagctactcgggaggctgaggcaggagaatggcatgaacccaggaggcggagcttgcagtgagcccagaccgagccactgcactccagcctgggcgacagagggagacttcgtctcaaaaaaaaagaaaatacaaaaattagccaggtatgtgcctgtaatcccagctactctggaggccgagatgggagaatcgcttgaaccagggaggtggaggttgcagtgagccaagattgcaccactgcactccagcctgggtgacagagcaagactccatctcaaaaaaaaaaaaaaaaaaaaaaaaaatttaaatagacagtctaacaatgcacctcaaggaactaagaaagcaagaacaaatcaaacccaaaattagtagaaagaaaaaaataacaaagatcagagcagaactaaacaaaataaatactacaaaaacacaaaggatcaacaaaatgaaatgttggttatttttaaaaaagataatataatctataaactactagctagattaatcaaaaagaagacccaataaacaaaatcagaaataaaatggatacgttacaactgataacacagaaatataaaagatcatcagagactattataaataactacacactaacaaactagaaaacctagaggaaatggataaaatcctggacacgaagcaccaagactgaatcaggaagattcagaaaaccttaacagaccaataatgaaatttaatcaggaataaaaagtctctgaacaaagaaaagtctgggaccaaatggcttcactgccgaattctatcaaactttcaaagaagaactaagactgattctcctcaaactaaaattgaaacggagggaattctccttaactcattctatgaagccagcattcccgatatcaaaccagaaaagaaaaaaaaaaggaaaactataggccgaaatccctcctgaacacagatgtaaaaatcctcatcaaaatactagcaaattgaatattttgctatattcccaacacataaaaatgataaatactcaaggtaatagacacttcaaataccattacttgatcattacacattctatgacacacgtaacaaaatatcacatctgccccttaaatatgaaccaatattatgtatcaacttgaaaaaggagcaagctatccttgttccttaatacgaaaacgtgtaaatattcacaacttgcaggatagaataccctaacaaaacatttactgacaatattgttctaaaatctcacaatgattaaacacatttcaacagggcttgagctgtctgttctcacagaactgacaatagtggctcaccactgagacctgtgtgagggtgtaaggcttgacaggaaaagggatactctatatctaagcactaaatatctctattgagagtttcaccataaaacaaatatatacatcatgtgatgtttaaaataaaagcagcataatacttaataacaatacatataataagaatatggatatatcctctttaatgaaaaaggagttctgctctgatgtctgagcaaaactgttaccatttttacctaaaatatctgatgcctaagagaccctgcaggaatagcaccatctccgtggtatgcaagtgctgagaatggtttaaaaacttggctgggcgcggtggctcatgcctctaatcccagcactttgggaggccgaggtggatggatcacgaggtcaggagttggagaccagcctgacctacacggtgaaaccccgtctctactaaaaatacaaaaattagccaggtgtggtggcgcgtgcctgtaatcccagctagtcaggaggctgaggcaggagaattgcttgaacctgggaggcagaggttgcagtaagctgagatcgcgccactgcactccagcctgggtgacagaggaagactcaaaaaaaaaaaaaaaaaaaaaaaaagtcctacagctggccgggcacagtggctcccgcccgtaatcccagcactttgggaggccgaggcaggcagatcatatggtcaggagttcaagaccagcctggccaacatagtgaaaccccatctctacaaaaattagccaggcatagtggcgggtgcctgtagtctcagctacctgggaggctgaggcagaggaatcacttgaacctgggaggtggaggttgcagtgagccaagatcgagccactgcactccagcatgggcgacagactgagactccgtctcaaaaaaaaaaaaaaaaagtcctacaattatactttatttttgtcgttgttgttgttgacacagagtctcgccctgtcacccaggctggagtgcagtgcagtggtgcgatctccacttactgtaacctttgcctcccaggttcaagtgattctcctacctcagcctcctgagtagttgggattacaggcgtgcgccaccacgcctggctaatttttgtatttttagtaaagacggggtttcaccatgtttgctggtctcaaactcctgacctacaatgatccgctcacctcggcctccaaagtgctgggattataggcctgagccaccgtgctcggccttacagttacacttttatgttgactttatgtttcaaagtcaataaaggaataaaacgccctctagtactgatgtctgtatctcaactttacattccattccaagtcattaacagtgtggagtcagagacatactgatatactagttttatctggattacaaaatcaggcacaaaatatatccccttattggctgccttttccaggatttaccaggtatttgtctatattaacacctgactttaggccaggcacggtgtctcatgcctgtaatcccagcactttgggaagccgaggtgggtggatcacctgaggtctggagttcgagaccagcctgaccaacatagagaaaccccgtctctattaaaaatacaaaattagctggttgtggtggtgcatgcctgtaatcccagctactcgggacgctgaggcaggagaatcacttgaacccgggaggcagaggattcagtgagccgagattgcgccattgcactccagcctgggcaacaagaatgaaactccatctcaaaaacaaacaaacaaacaaaaaacaaaaacaacaaaaaacatgacttccatgggcagcttctctattcctgggctacggagagccgacagtgcatccaaatgtggcccctgaacaatccctgctgcccaacagcactgacaccacgggaccctcaccccgtctccatccatgtctgggtgtgagcccttcccaggaccatgcccagtggactcttcagaagttcatgtcacagggtcagggtgagacggaatctcagtagagatgagaaggactgagggaaggcacgggtcaatgtgagcaaacgcgtcaggcaggatgcttcagactcagagaagatttgcagctccaaggcattgtctcccacctttctgaaaagagggagacagaatgatccacacagaatctttctttacctgagtaaaagccattcctgactcctttgctctcctcttctgggtttcttcctcatgtgccaggagtctttggaagtcaatgctgaataacaacaacaagtgctgtttattgcttagaaacaacacaccccctcttgtgtgacaagcacacacatacacagggaggagctcgccctgtgcaaagacggtcctctgccgcccactacaccagggtggccccagggacaagaaactcctacaggaaaaccaatacatgagtcttctgacccctttcttcagaactccctcccctcctggagaagctcacacacatgctgcagcagtggggaggagacccagccctgattaaaccccatgcagagcacagccccctttccctctctggatcccaggctgggctcagccctcagaaatagaggacacagagccttggtgttcagggctggatatagattagaatcatgttgggcactgtattatcgagggtgggtcccaacctgtgtgaatgggaatctctgggacagggatgggggcacaagaggtatatctgcaaagtaccccagcactttcatatgaagccagggggtagctctactcacatgtggtcagcccagcatagcccccaccttctgactctattctccccttgagaccttggtgtcatcaggatccagacagtggaagcagaaagaatcaagagaagcatgcagaggaggtaatatggaccagaggtgggggtgagggtgtagctggagtgtgaaatgggaagtgggtcacagaagtccccgctgagaaggtgatattggaaccgagacctggggaaggaggggtgtttgcacctgcagctgaggggccagcgagttccagcagaggcacagcccacgtgaaggccttgaggcaggagcaagctcggcccaggaacaggaaggacgcatgcttggctggagcagagggagcgaggaggacacaggcaggagatgaggtcagagaggtcctgggagggcagatcaggcagggcagatgctgtcaaacatttttctcccacacctcaaaagaattttggaaatgatgtatttcctcacccattttaattaaatatataatattttctttataaattaacccacttacaatgtaaaatcttatatatttgaaagtcccacgaaatacatggtcccgctcatctgagatgtgcaggactgcaggggaatgcatctagggagtcaggaagtcacttttggacacctgaaagtggagatacctgttacatgtcctagcagaaagttgaggagaaggctaggcgcagtggctcacacctgtaatcccaccactttgggaggccgaggcaggtggatcacctgaggtcaggagttcgagacccacctgaccaatgtggtgaaaccccatctctactaaaaatacaaaaaaattagccgggcatggtggtaggcactggtaatcccagccacttggtaggctgaggcaggagaatcgcttgaacccagagggcagaggttgcggtgagccgagatcgcgccactgctacagcctgggcaacaagagaaaaactccgtctcaaaaaaaaaaaagaggtttatttggctcatggttctgcaggctgtacaaaacacagtgccagcatctgcctctgatgagggcctcaggaagcttccgtttagggtggagggtgaaggggcgccagcagggcagacaaaatggtgagagaggagacgagagagagagagagagagaggtcaggctttttgacaaccagctctcaggggaactaagagtcagaactcactccctagagaatgacatcaagccattcccaagagatctgctcccatgacactcaccaggccctacctccaactttggaaatcacatttcaacatgagagttggtggggcaaaacaaatcatatcctaacaattgcacattctgaggctatgagtggggctggcgtgtggtacacaattggagggttagtagcagccaggagcaggaacagaccattcccagtcactactgagtagggatcccaagccctgagacaggtgggtgggtaagttggaaaagatctcttccttgcttccagggactcaacggtgaaaaaaaccaaggcctttaaatgagcaaaaagaagaaagaaaatctccagagacaaggtgcagaatagaaaaataggagaatggaagaggtgcggggcaggaattaaatgacaccaggaattctggctgtatgttttctccaggctgtggtcagctacacagggacagaagcagagtaacggagctggatgtggggatgtctgggagaaacaaatgatttagtgcacttgacttgcaaatcatctagtaactgaaagggtctgtttatgtccaatttttttttttttgagacggagtctcactctgtcaccaggttggagtgcagtggcgtgatctcggctcactgcaacctccgcctcccgggttcaagtgattctcctccctcagcctcccgagtagctgggattacaggcacatgccaccatgcccggctaatttctgtatttttagtagagacggggtttcaccatgttggccaggatggtctcgatctcctgacctcatgatctgcccgcctcagcctcccaaagtgataggattacaggtgtgagccaccgcgcctggccttttttttttttttaaacaggatcttgctgttggccaggctagagtgcagtgatgtgatgctggctcagtgcagcctcggcttcctgtgctgaagcaatcctcccacctcagcctctcgagtagctaggactacaagaggcacgagccaccacatctggctgatttttaaattttttatagagacaaggtgtcactatgttacctaggctcgtctcaaactgggctcaagtgagcgtcctgtctcagcctctgaaagtgctgggattacaggcgtgagcaaccatgcctgccatatcactatcattttaaaaataaactggagccaggcgcggtggctcacgcctgtaatcccagcactttgggagcccaagcagatcacgaggtcgggagtttgaggccagcctgattaacatggtgaaaccccatctctactaaaaatacaaaaattagccggacatggtggcacgcgcctgtagtcccagctacttgggaggctggggcaggagaattgcttgaacctgggaggcagaggttgcagtgagctaagatcacgccactgcactacagcctgggcaagagtgagactccatctcaaaaaataaaataaaataaaataaactggatatggtagaggcacatattcttttgttttaccattattattcctggtgtagacaaaaaaaaaaaaaaagagcctggcacatgacggagtatttgttgaataaatgagcagaatgatacagggtgacactagtgcaccctctggtacggtgttcactttgagggactgatgtgtgcaggggtcctgtttcacctgaggattgtcttcaccgagagtgagaagggacctgagcaggaccagctgaggggcagagccaagggcccttcatggagaccactctgcttaccaacctgtggaagggcaagcgcaagtccacccagaaacacatctggctgactatgggatccctgtctgaggctcagcagacccacgtggccaataaaagaccctaaattctgcaaaaagaagagtttgtctctgtgcccaggcccctccatggaaaaaaggtcctggggtctaagatttctcacttggcaatgatgttggcttgaatattattcacagacccagatccttgggtcttgcgtggggcaaactgactgcagaactgcaggaagtgagagtctgaacagagcagcagaaaggcaggcaggagacttgagggaggggagaaaggagagacacaagcagaccaacccctcctctccctcaatcacccgcctagggaagcattagtttcccatcatagagaggacaatggggaaagggagaagcgtgtgcataggatgagatgtgtgttgggtggacagaaagactcctttccctaaatgtgaccccattagctcaccccattctattgcacaaattcctgagcggaggggcaccctgtggggatgaacacagctcttcctgcctccagttcctgcgtctccctgccatgaccagggctgtaaccctccaactcccttcccagggccccgtggcccctctgcactggagaaaggtccatgttccacagcgggtttcaaggaccttgcccctcagctccccagctgccttgtgactctgtgactctgttatcttggaataaacagggagaggccaccggcctggctgcaagaatgtggcagctttatcttcccaaggacagtcccagtggaagcctttgggccgcaggtcagtgtgctgtgtttcactctgattcttggagaaatctttcccttactctgggaccctgataatcactccctcttgagttgcacccacagacgcccccacaacaaaccctccctaatgaaagccatctgcgcctgattcttaggatccccgttgccctctggactcagacacgcttacaaactcccatggggtcttgcactccccagatagtccataaaggtcaggcactgcctgaggacacagggtttatagaagcccggctacgaaatttcgcaagtcccagtaacaatgaaataatacacataaatatcttagggtctcactgacccacgacaatgtatttatttccactcatagtgactccaccccacacaaaagtaccaccaaagcctaccaataaaacagagatgtctctaatgatgcacgtgccccaatgagatcctaatatcttccaagaaaacactccaaactgttatttctatctttcaaaatgcatctgaaagcttcctgatcggccgggcgtggtggctcccacctgtaatcccagcactttaggaggctgaggcaggcagatcacgaagtcaggagatcgagaccatcctggccaacatggtgaaaccccgtctttactaaaaatacaaaaattagctgggtgtggtggcgcgtgcctgtagccccagctactcgggaggctgaggcacgcgaatcgcttgaacctaggaggtggaggttgcagtgggccaggatcgcaccactgcactccagcctgccaacagagcgagacaccgtctcaaaaaaaaaaaaaagaaaaagaaaaagaaaaagatactagggctttccaaactaatccatgcagtcccataaccacccataaacccacgtccatgtgctacagccagacctgagacattcctttacaattctactcactccttgatcccacaagcatgcgtgggacaggtgtacacatcattcacccggctcatctagaggcccaccttgcttccatgcccctatgtgacacctccaagaatgcttcttcactttccctcatttttctacttctcttccatgcatgaagagcacactaggctgaaaggcaaaagggcctctggacaaaagcaggaatggacacaaactgctatctgcaggacagtgggcctcaagtctagattctagaagttggccatgctggaaggaattgcccccaatttggggacaccatggaatccagtttaaaggcaggtgaagattggctggactgagctgacggaggatgtccaagaaaaagagaggccccagatctcatgagggaggctgccattgtccccttgtctctccactcacagtcccctgccaaattcccccgctgtttagggagtgcctccttcatggcccgtttagcttctgaacttctcgccacccttcctgaagggaatccaggacccctgactgtgagcgcatcacctgctggaaggcaaagcccctgcccaggatggccactgggccccgctgatgtgtagagcgtggaagacccgggagctggagtaaggcggtggggacgcctcggcactggctgaggacacagggtctgcggggcttttcaggcctcagtgaggccttctgctcttacatagactggaataaatagccacaggaagtttagaccaattacagatgaaatttccagaatatgagaccatcctcactacccgccctgtccttttggtcttccctgaggagtcttcagcccaaccccagccccagcatctgaaccacaaccccggagcaggtgctgcagtcatcccgtggcccagatggagactgtgtcctccaatggagggagacacaaaacactcaaaataatccacgcagaagagtgtccgatgtggtgatggatgcggagacagtgaaacctgaataatgtgatagagagtgacgggcagagagaatttcagatgggggtgggagggcacgggagacatctctcagtctagacccgaaggaggaaaaagggacagggtcacgatcatttagggacatagggtaaaagcagggacaacgacccgtgacaggaagggttttgacatttgggaaaagagaaaagcaaatgtgactggtgcagagggagtcatgagatgagggcaagctcccaggaggaggctggacactggcaggggccctggacacagggctgtggagccacagtgaggagttgggcttttgtcctggggaacacaggaagctggtggagggttccctgccagggactgacgtgacctgctttagatttctctgtgatgtcctcatacagagaaaggccccgaagatggtctctgtgtctgagtccctgcttcacattcttgttttcatttttagaggaagaaatccaaataaaaattttaattgcaactggctagtccccccacatacaactgccaaacacaaatgcacacccaattttgccccaaatttcaggagtcagtgttgctcacattgaggttttctggtctagtcccttatctctgttacaggtgggctcactgaggctgagagagggagtcatttcaccaagttatcctgagaggtctgagttgagtgagaaggaggagatgtggctgaattatgatgtcacgacctggaagggccaatgggctgtgtttgcctttatcacatctcccttagaaaattccaggactggccaggcatgttggctcgtgcctgtaatcccagcacttcgaggctgaaggaggggagattacttgaggccaggagtttgagaccagcctggccaacatgatgaaagctcatctctatcaaaaaacacaaaagttagccgggtgtggtggcctgtgcctgtaatcccagctactcaggaggctgaggcaggagaatcgcttgaacccgggaggcggaggttgcagtgagccgagattgcaccactgtactccagcctgggtgagagagcaagactccagctcacaaaaaaaaaaaaaaagaaaagaaaaaaagaaaattcccagaccctctttcacatatctgagcaaaagaaacttcttcaaggttttatcacattggttccaaatgcagctcacagcttactattttaacaaattacacaaaagaagaaaattgaataatagactagttaaactaggtttccatgttaaggtaaaaacatcattgacatctttatcaggtacacattgaaacaatctaaaattacctactagtcaacaaataatgcttctattatataataaagagcagaaagcatgcagacctctatcaaaactggacacaattaatttcaaagggaaagattttgaaattgttaagaaatatctgatgaattttggagctaaaaaaattgaaaacacattatatttagaaaatgccatgagctgattataggatgccaccaaagttactttggaaataattatatacagaaaaatagaaactgaattaatgaagatctatctcaagttgcaaaatgaactatacatgagatgaaagggaattagtaagaaaaaaagcaaatcaattacaaaaagcaacaacactttttttgtttgttctttgtttttttttcagacgcagtcttgctctgtcaccggatctcggctcttggctcactgcaacctccgcctcccgggtttacacaatgctttgcctcagcctcctgagtagctgggattacagatgcgtgtcaccatacctggctaagttttgtatttttagtagagatggggtttcaccatctttgccaggctggtcttgaactactgaccttgtgattcacccacctcggcctcccaaagtgctgggattacaggcatgagccaccatgcccagcctcaacacttttaatgttccttttgagcaacgttgtccaatccgcagcccaggaaggctttgaatgcagcccaacacaaattcctaaacttccttaaaacattttgagattttcttgcaacttttttttttttttttttttttttttttagctcatcagctattgttagtgttagtgtactttatgtgtggcccaagacaattcttcttccaatgtggcccagggaagccaaaagattggacacccctgctttagagagacactatgtagtgacagtctttcactttctgcccagctttactctcccactcccccttcccctccccctgccccaacgccagggaaggggaagaggatgacctgtggaattaatgagtcaagtcacttccctctgccttaacagggattgcaagtggaagctaacttctgatgccataattataaaatgcaccagccttaatagacaggagctttgcaattctcatcatctgtgcattttaaacttataaagacagaaatcaacaggtcaaaaggtagtcatcacatccagtcagttcacaactcacctggacctggggtccccctctttcctcattatggtgtgtttccctccctcgttccgtacatcgctctcattctcaccttctttctctagctctttccttcccctttattttctccctaggattctgctcattttgagcccctctcctctcctgctgctcctccccgtcttccctctattctttctcttccacttgctctttccattcttgcaatgtatttaattcctctttcttcctaatcttttcattgtcccagtctccacatatttctggctctttcttccccatttcagcactccctgttaaattccctcttccctgttacacaccgttgtccccactctttggcacccccagatcccaggcctccccgtgctgtggttctccctctgcttctccttgtcatcggctgccccctcttgctgtcccggtaccacactgccctgtctgccctggctccaaatcccttctgctctcccccactctctgtctgaggagcctcctcctttgctgcccctctccctacctggctgtccttcatctctctggatactgtgctttttctcgaaatgtgtctagttacttttctctccctgctactttctcggcttcttcttccactcttactgtctctgaaaatctctaaccatcctctactttgccatctgtttattggtttgcctcattccttcctgtctcaggttttctactgctctctctgtccctcgatccctttggcccacacattcacaggacggtttggggtaagacgcctgcatcctggaggagcgcattttccacggggtggaggagggcaggcaagaacatcgggtgtcacaggacaggccctgagcacctccccagcgcgggctcaggggaggcctggggagcagcggggcccggcacgaggaggagggaggtggggcgcgacagcgccttcagacaggggtggggtctgcaggatcccaggaccaggcagaggacgcaaggctccccgggactgcggctgcagctgcggcgctgcgctccaggggccgacgagggcaaggctgggaggcacccaggacgggaatacacctcttgggtgaagactttaaaaagcccggggatgggggagggggtcaggaaaaggttttaagcgggaggaagaagcaaaaggccggggacggggagcagcctcaaagcgacttcaacccaaagggaagcgactccggacccacactgcgaggcctgtattcacctggggtggagtgtacggggattttaagggccgtatcgaccctggacatcggctgtggaaatgggaaacagggagcgcaggtttaatctacacagagggtcactcacgctcgacgccgtcaccttcacccaacgcgatccgtttccgggcctgtaggaaactgcgcatgcgcggagagaagagcccgggcagcctgaaggaatggctggagtgggcggggtctgcgccgctttaaggtaaaaaaatcagagttgtgtgggccacttatggtggaaaccaaaatgttttccacttaccaagttgaaaacggtttatgttaaaactattttgcctgcaggttggacccgatcctgctagggagtctcctgcagcttagcagtccgggaactgggatttcggtggggaatccaaaactagcagtgattggatccataaaagttaccaaaaaacaaaaatgaagtgtctggaatcactccactggatttcaagactaccaatataggaaaggtaataaaaactgtgtggttttggggcaataaaagacatatggattgatgcaatacagtaagagagtacaaaaatagcctctacaggtacttccaactgatttttgacaaagttaccaagggaattgaatgaagaatttttaaaaactggtgaggggctaacttaatatccacagcaggaaagaagtcatctctactcaaacttcacaaccgtacagacattagttcaacattgaccatagcctaaatgtaaaatatcaaaccataaaatggtatcctgtaggagactgaaagaaaaaattactcacaataaaatcgtaagaatcaagagcttgttcaaaaattcttagccatagcagcaaaagcatgattcattaaagaaaaaaaaaatcaactggtatttaccaaattaaaaacttttggtctgtgaaagaccttcagacgatgaaagaaaaggtatttgatatggtttggctcagtgtccccatcaaatctcattttcaagtataaacctcaggtgttgagggagggacctggtgggaggtgactggatcatgggggtggttttccccaagccgttctcatgatagtgagctctcaggagatctcatggtttaaaaatctgtgatagttcctcctttgatcgctctctctcctgctgcaagcaagacgtgccttgcttcgcctttgccttcctctatgattgtaagtttcctgagggctccctagccatgcggaactgtgagtcaattaaacctcttttgtttataaattacccagtctcaggttgtcacaggagggtttaggcagtgtgaaaatggactaatacagtactgaataatagaaaatatttgcctaccatatatctgacataaaactggtatgtggaatgtataaagaatcctagaacgacttaaaaaaaaagcaaaataatcaaattagaaaatggatagaactatgaagagacatttcactgaagcagatatactgagataaatgggcacataaaaagatttccaacatcaccatccatcaaatctcagacctcagcatattctgctttctccatgtgaacccctggatgctgtcagagatcatgagaaacacaggagcttctactgaacagtccagttgatgtgtattagcaacctgtaattgtttttggaaacgaacaatggaaacacagatacaaaaatattctcagctcaagaaatatgcactttgtcattattagtgatttttttttttttttgagacagagtcttgttctgtcacccaggctggagtgcggtggtgtgatctcagcttactgtaacctctacctcccaggctcaagcgattctcctgcctcagcctcttgagtagcttcaaccacacgcacgcgccaccacacccagctattttttgtatttttagtagagatgggttttcaccatgttggccaggctggtctccaattcctgacctcaggagatccaccccccttggcctcccaaagtgctgggattacaggggtgagctacagcgcctggccaccactagaactaacacctcaggtactggatgcctccttcgaaagattggataatcgttcttacaggattatgtggtaatgagtgtctctgtcattcatttaggtaagatgcatacgcaatagtgatctataaaatatagacttaattgatctataaaaatatagatttaatacaaagttaccacaatcacaatgatatatgaagataaaccatttaaaaattacaagagatactaacaaaataggtatagatggtgagtaaaggacaaaaataactagcattgttactgtagcatcatcattaaaagctttgtctttgcaaccagacaacatggattcaaatctcgattctgcctcttactgaaatgtgacaagatgagtcttttaaagcagaatatgctgagatctgagatttgatggatggtgatgttggaaatctttttatgtgcctatttatctcagtataactgcttcagtgaaatgtctcttcatagttctacccattttctaaatatatatatatatatatatatatatatatatatatatatagagagagagagagagagagagagagagaaagagagagagagagagagagagagatggagtcccgctctgtcactgagactggagtgcaatggtgggaactcggctaactgcaacatccgcctcccaggctcaagcaattctcctgcctcagcctcccgaatagctgggattacaggcgcccgccatcacacccagctaatttttgtatttttagtagagacggggtttcaccatgttgatcaggctggtctcgaattcctgacctcaggtgatccccccgcctcggcctcccaaagtgctgggattacaggcatgagccactgtgcccagcctaatttgattattttgcttatctgtcctaagtttcctcacctctgaaatgagaatatcattaatacttatttcaggagctgatgattcagttgttacacataaagcattaataactgtgattcttactctaaatgtgattgatataaaatatatatgcaaagataaatcacttattaaagaatatatatcagttttttaaaatggaaacaaatctaaggggagtatattaaatggcagctgtcattgcaaaagttgcacaaatatcatgttttgctgtaagatcctctggctcagaaaagaaataccagccacagtaggaagttgaattgcctccagggattcaatgagagaaattatctcctttgcataaatgataattaatatcttggggactctcttattaactgtattttcatttacttctccagatgctggttaacctccacacgcttgattttcaagcatctgatctttgataacttccatattaagagacttcatttcaccatctagtatccctgtactttaattgaactaaagatttacaaggacactccattttcctatttacagagaacctagtctgtacctgccattgttttacatacattttcatgtcacaaaattttatttctaaacaacaccctcatttatgtattttctaagtgttcactggagtaacacagagaagaaatgcagtaaacatataatttggattaaaatgtatggaaggaaaaaatccttaaagtaaaaatcatatacaaaaacaaaaagtcattttactactattggctcatggctgtaatcctagcactttgggaagctgaggcaggaggaatgcttgaggccaagagttcaagaccaacctggccaacatagcgagaccccacgtctaaaaagaaaaagaaaaaaaaaaagaaaagaagctatggagaatatgttacacaataccataaactgaacaagacatgaatataacacagcctttggaaaaatgccctttggctaaaattgcttgatcatattatgtaataaacttttccacaaattcatttgcattgaactactgtaaaaatattttaggcaatttaaacagcatttcacaaatattttcaagaatgacgttgtgtaatgggccctatgggttcagcagaaaggaagagtattatctactattatgaagaaagcggaggtcttccctaacaaagaagttagaaatttcttttgtttttttgagagtctcactctattgcccaggctggagtgcagtggtgagatctcagctcactgcaacctccgtctcccgggttcaagtgattctcctgcctcagcctccctggtagctaggactacaggagtgcgccaccacacctggctaatttttgtatttttagtagagatggggtttcaccatgttggccaggctcgtcttgagctcctgacctaaggtgatccacctgcctcgggctcccaaagtgctgggattacaggcatgagcctgtaatttctggccatgcctggccagaaatcagaagttgcaagagtaaatattcagtgttgtactacagtcagtttccattttgtgatttttgtcttataccaccatttatacctctgcactccctcttcttattctgcccatctggccaagctgataatgtccgtgttccctcctttggcactagatggaagttcaaatcacgtgtgggatcctcaccccaacccacccttttattaaaggttattaccataacaccccaagcaagttatttatccctgctctctcaagccattttggaccagtttgggaagtcaatcctgcttctcacagaaagcctcattatgcaatacacatttccctaaaacttcattgttcagcatcctcattttccatatctaaaccaaactgtaaatggagttcaatacacttcctgtggagaggtgacaaattaacattaccaaaaacatgataaggctaaatttatgaaacttctagtttacctacaaaaacaaaatttccattatatatgttcatttttaagaggaaactcatgaatattagtcttgtcaaattatgtgagcatagcattcttagtgttatttttgttattctgcactatttataatttcataatttttttttttgagacggagtctcactttctcgcccaggctggagtgcagtggcaatctcggctcactgcaacctccacctcctgggttcaagtgattctcctgcctcagcctcccgagtagctgggattacaggcgcatgccaccacatccaaccaatatatatatatttggtattttttagtagagatggggtttcactgtgttggccagggtggtctcgattttctgaccccatgatccacccgccttggcctccctaagtgctgggattacaggtgtgagccaccacacccagccaatatttttcatacaattgttttttttgagacagggtctcgctctgtcacccaggctggagtgcaatggcgcgatcttggctcactgcaacctctgcctccaggctcaagtgatccacctgcctcagtctccctgaggagctgggactacaggcatgagccaccctgcctgggtaatatttctattttttttgtagagacagggttttgccatgttgtcctggctggttcaaactcctggactcaagtgacccccctgccttgggctctcaaagtgctaggattacaggcatgaaccaccacacccagcccatacactttctatatttgtattttcacttcatgtaaataaagatgcatgccatagttatttagcacacaagcatgtaaaaatataatatggtatatattcaccaacactgtggcagctttcagagtgtaagagtatgaaaactgcactttctatgggattttcattatatccatataaatattctaaggcagagtgtagagagaataattcaagtgcagagtatgattacattttcccaaaattgtatgttgattccacaaagaaaaaaaaaattgttctacatcctccaacctaaaagactgagtgtattgttattatctgctatgaagtatcctactgaggtaggataaaatgatgttggtacaaagaatgtgatttgtttatagttataagaaaacgttgaattttttttagcaaaacattatgtctgtgacacattcttaataaaactgtagcaaaatgtaattccagcaattagtgtgaattctactaaaaacaaaacaaaacaaaaaaaaccatggtattctggtttttctgaccaagctctccactctaataactgttacctcttcaatttcaaaaataagcctatttttcatcaatctctgctataaaacagctattgccattcagtagagaaagtggcaaccatttcccctgcactattcccatcacataatcagtcactaataacttattactctcctctcataaaaattccagtgtcctgaggtcttggcctgctcaatgcaggtagagccttacttccctaaaacccatggtgtctttctctcagaaaagcaccctgaacacaatcagtatgatgattgatatcatagttttacattattttctgccccaaaaccatggtctctcaattgagagaatatttaattttacaaggcagagtcctccttcttcaataaacatggataaaaatgatcctcatgtaatgaagtaagcctttccatactgtggttctttcccagataggcaccacgaaaggtgcttaaggatgcaaaatagccacagatccatagttcaggttgaaagtcacaaacagtagcctttttgagaaacctcaaacaatggaataaaagattttataacctgaaggtaagtagccatttccaaatgtcctttgacctttgaaatatataatgtcttaagttttaccatattggaacgtgtaattattgtgcagtttatcattttaaaagtgaatcaaagaactagagactgagtcactctttgtatgaatcctcacctacagttacagtcttagagtaagagcttcaggatgctcttacacattacatttgtgtggttccatcaaatacgtagattttaatgcctgcaaagctgtgaggcctgaataaagcctctgtcacacacagtacatttatgtgatttctcattattatggactcttggatgtctattaatacttgaactcatgaggagtttgccacagtcattgcattttttttttttcctttaagatggagttttgctctttttgcccaggatggagtgcattggcacgatcttggctcactgcaacctccgcctcctgggttcaagtgattctcctgcctcagcctcctatatagctgggattacaggcgcacgccaccaggcctagctaattgtgtacttttagtagaaatggggtttcgccatgttggtcaggctggtcttgaactcctgacctcaggtgatccacctgcctcggactcccaaagtgttgggattacaggcatgagccactgcacccagccagtcattgcattttcaaggaatctctcaggcataaattctctgacgttgtcaaaggaatgaattctaactgcaaaagttaccaccttcatttgtaaggtttctctccactatgaattctgtgatggcttgcaaggtttgaactctgactttagaactttccacacgttacatttgtaaggtttcccaccagtatggattgtctgatgggtagttaggcttgaacagatactaaagggtttcccacactcatatggtttctctccggtatgaattctctgatgccttgcaagttttgaagtttgactaaaggctttgccacactcattacacttgtaaggtttctctccagtatgaattccccgatgtcttgcaaggtgtgaattctgagtgaagaccttcccacactcattgcatttgtaaggtttttttccagtatggattgcctgatgggtagttaggcttgaacggacactaaaggctttcccacactgattacactcatatggtttctctccagtatgaactctctgatgccttgcaagctttgatgtttgactaaaggctttgccacattcattacactggtaaggtttacctccagtatgaactctccgatgtcttgcaaggtgtgaattctgagtgaagaccttgccacactcattacatttgtaaggtttttcaccagtatggatgacctgatgggtagttaggtttgaatgttcactaaaggctttgccatactcattatacttgtaaggtttctctccagtatgaattcgctgatgccttgaaaggtatgaattatgcctaaagaccttgccacattcattacatttataaggtttctctccagtatgaattccccgatgtcttgcaaggtgtgaattctgagtgaagaccttgccacactcattacatttgtaaggtttttctccagtatggatgacctgatgggtagttaggcttgaatacacactgaaggctttgccgcactcattacacatataaggcttcactccagtatgaattctttgatgatttgcaaggtgtgaattttgagtgaagaccttgccacattcattacatttgtaaggcttttctccagtatggatgacctgatgggtagttaggtttgaatgtgctctaaaggctttgccacactcattacacttataaggtttctctccagtatgaattagctgatgccttgcaaggtgtgaattacgcctaaagaccttgccgcattcatgacatttgtaaggcttttctccggtgtgaattaccagatgaatagctaggcttgaacgaacaccaaaggctttgccgcactcattacacttgtaaggtttctctccagtgtgaattctccagtgatttgtaaggtgtgaattttgagtgaagaccttgccacattcattacatttgtaaggtttttctccactgtgggttgcctgatggatagctaagcttgaacgagctctaaaggctttcccacactcattacacttgtaaggtttctctccagtatgaattcctcgatgtcttacaaggtgtgaattctgagtgaagaccttgccacattcgttacatttataaggtttctctccagtgtgaattttctgatgttgtgagagttgtgaatttcgactaaagaccttaccacactcattacatttgtaacgtttttcgccagtatggatcacctgatgggtagttaggtttgaacgtgttctaaaggctttgccacactcataacatttgtaaggtttctctttagtatgacttctctgatgacttgcaaggtgtgaattttgaggaaagaccatgccacatccattagatttgtaagggcttccccaattatttgctttttgcccctgtgtgagtaataaagaagagataaaatctttgagatatttcttagaaatgtgggttttgacattataaggcatttgttgaggtggtgaaactgaggaattattgttgaaagacttctcaacctgattacattcataaattttcccttcatattgaaaaagctgcagttcaggcagatgtgactgaaggcttaatccaagctgatttttaataagcttgtttcttgcatctcttttatcatgttcatctcttccatgagtgagattgccttcttgggtcaaaagcactcctttgtaatttccttcagcatctctgcattgatactcaaggccatgtgtatttttctggacttccctgaaggaacatccttcaatgtcttggctttcctgtctttccaacatcactgtttggaatacttctcctgtattactcttccctttgtgtagtaaatctttcattacaaattcggaagagagagctacaagatataaagatccataggtttccaattaattgtagtacgtaaacaagtattttacaccgaaaaacaatattacaccgaaaaacaatattaaaccaaaagcaattcttatattaaacagatttatgaaacttcagaacaataatattcaatttttaggaacacaaaggaaagaggattgtttaataaagttgattccatgtaattcaaattaatagtatggaagcctagttcccaacctacaatactgtagccagcaaagcaatcgttcagtcataaaggagagaaagtcttccccagacaaacaaagctaagggaatttaccatgatcagacctgttttacaagaaatgataaagggagttcttcaaatccaaagaaaatgacacgatgtaactgttacactaatattaatatcataatcatggtgtgcaaaccatttgtatatttactaagagggctaaaagataaaactattaaaaataagcacaacagtttgttaagtgataggcagtacacaacataaattgcgacataaaaaattcaaaatgcagggtgagaagggaacgaacatgcacagaggttttagtttctttttttgcaatcaaagttagttgatattgatttgagataaattgttaaaagctataggatgtttttatatttatttatttattttttattatactttaagttttagggtacatgtgcacaatgtgcaggttagttacatatgtatatatgtgccatgttggtgtgctgcacccattaactcgtcatttaacattaggtatatctcctaatgctatccctcccccctccccccaccccacaacagtccccagagtgtgatgttccccttcctgtgtccatgtgttctcattgttcaattcccacctgtgagtgagaacatgcggtgtttggttttttgtccttgcgatagtttgctgagaatgatggtttccagcttcatccatgtccctaaaaaggacatgaactcatcattttttatggctgcatagtattccatggtgtatatgtgccacgttttcttaatccagtctatcattgttggacatttgggttggttccaagtctttgccattgtgaatagtgccacaataaacatacgtgtgcatgtgtctttatagcagcatgatttataatcctttgggtatatacccagtaatgggattgctgggtcaagtggtatttctagttctagatccctgaggaatcgccacactgacttccacaatggttgaactagtttacagtcccaccaacagtgtaaaagtgttcctatttctccacatcctctccagcacctgttgtttcctgactttttaatgatcgccattctaactggtgtgagacgtaagccttattttatggtcaccacaaagtaaaagcctgtaatagacatattaataataaaaagcaatgaattaaaacatactgccgttttgttacttcttttctaattgttttctaacttctctcttgctttctttcttactgtcttcctttgtgtttaagtgatttctctggtagtataagtccttacctatcaataataacattaaatagaaatggactaaattttccaattacaagagagaggcctgctgaatggattataaaacatacagctaactatatgttgcctacaacaaactcacttcacctataaggatacatgtagacaaaaagtgaggggatggaaaaagatatttcatggaactagaaatcaaaaaagagcagtagtaggtatacttagataaaatagactttaagtcaataagtgtaaaaagagacaaagtcagtatataatgagaaaaggatcaacttagcaaaaggacataataaataagtacacacccaaatatgtaaagctaatgttaataaatctaaagggagagacaggtagcaatacaataatattaggggacttcaaaacacaatttttggtaatgaataggtcatccaggcagaaaaccaataaaaaaaaaattagagttaaaatatactgcagactaaatggacctaaaaaaagactttttaaattttttttctattttaaacagatgggatctccctatgttgcccaggctgtggtccattgcctagtcacaggtgagttcacagtgcactgcagccttgaacttctggccttaagcattcctctctcctcagcctcccaagtagctaaaattacaggtatgttccatgccctaacagacgtttacagaccattttatccagctgttgcaaaatacatattcttctcatcagcacatggattatgcttcaggatagattatatgttaagacaccaaacaagtctcaataaattcaaaaaagtcaaaattgtatctagtatcttttctgaccacaataaaataacactagaaaccaacaagaagagcctcagaagatacacaaacatggctgggcgtgatggctcacacctgtaatcccagcacttagggaggccaaagttgggcagatcacctggcgtcaggagttcaagaccagcctggccaacatggtgaaaccctgtttctactaaaaacacaaaaattagccaggcgtggtggcacacgcctataatcctagctactcgggaggctgaggcaggagaattgcttgatcccaggaggtggaggatgcagtgagccaagattgtgccatgcactccagcctgggtgacagagcaagagtctgtctagaaaaaaaaaaaaaaaagaagatacaaaaacacatggaaattagacaacatattcctgaacagccactgagttaatgaagaaattaagaaggaaataaaacatttctttttttttttttttgagatagggtcttgctctgtcacctacactggagtgcaatggtgtgatctcagcccactgcaacctccacttcctgggctcaagtgatccacccacctcagccccccaagtagcagagaccacaggcacacaccaccatgcccagctaatttttgtatattttaccaagacagagtttggacatgttgctcaggcaggtctcaaactcctgagctcaagcaatccgcctgcctcagcctcctaaggtgctgggattccaggcatgagccaccatgcctggctaaaaatttcctgaaacaaattaaaatgcaaaacagcacaatctataggatacagaaaaagcagcaaaaagaggaaagtttgtagcaataaacacctatatcaaaaaaacagtaagtcaacaaataaaacacctaatgatacaactcaaggaactagaaaagcaagaacaaaccaaacccaaaagtagtagagggaaaggaataataaagatcacagtagaactaaccaaaataaagactaaaaaaaaatctaagatcaataaaatgaaaagtaggattaaaaaaaaatttttttttttttgagatggagttttgctcttgttgcctgggctggaatgcagtggcatgataccagctcaccataacctctgcctcccaagttcgagagattcccctgcctcagcctcccgagtagctgggattacaggcatgtgcccccacgcccggctaattttgtatttttagtagagatggggtttctccatgttggtcaggccggtcttgaattcccaacctcaggtggtccacccaccttagtctcccaaagtgctgggattacaggtgtgagccaccgtgcccggcctaaaaaaatttttttttagagatggggtctatctctctcacacaggctggagtgcagtggcccagtcataactcactgcagccttgaactcctgggtttaactgatcctcctccctcagcctcccaagtagctgggactacagaaacgcactaccatgcttggctaattttcgttttatttttagagatggggtctctttctatgttgcccaggctggtttgaactccccgcctcaagcaattctcctttctcagtctcccaagttcctgggattacaggcatgaggcaccatgcctagcttgaaaagtaggtttttctaaaagataagcaacatcaacaaacttttagctaaactgaaataaaaggtggggggaggtacacccaaattaataaaatcagagacaaaacagaaaacattagaactgataccatagatacacaaaggaccattagggacaattatgaacaactacatacaaatttaaaaacctagaagaaagggatacatttctggacacatacaacctatcaagattgaaacatgaagaaatagaaaacctgaagacactaataacaaaattgaagctgaaaaaaaaaaaatttcatgtagaagaaaagcccaggattgaatggattcactgctgaattataccaaacacttgaagaagaactaatactggctaggcatgttagctcacgcctgtaatcccaacagtttgggaggctaagatgggaggactgcttgatgccagaagtttgagagcagcctgggaaacacagcaagacctcggctctactaaaaaataaaaaaggatttggccaggcacggtggctcacgcctgtaatcccagcactttgggtggttgaggcaggtggatcacctgaggtaaggagttcaagaccagcctggccaacatggtgaaaccccaactctactaaaaatacaaaaatcagccaagtgtggtggcacacgcctgtaatcccagctacttgggaggcagaggcaggagaatcatttgaacctgggaggcagaggttgcagtgagccaagattacgccactgcattccagcctggacaagagaacgagactgcatctcaaaaacaaacaaacaaacaaacaaaaaaacacaattagttgggcgtggtagtgtgtgcctgtaaccccagctactggggaggatgtggagggagggtcagttgagcccaagagtctgagtttgcagtaagctatgattgtgccactgaactccagtctgggtgagatagagagagagagactatctcaaataataataataataataataaagaaagaaaagaaaaaataaagaatactaattctactcaaaccatttcaaaaattgaaggcagcacatatttccaaactcattttatcagaccagcattaccctgataccaaaaagcagacaaggacaccacaacaaaaagaaaactataggccactacccctgatgaatatacatgcaaaaatccttgacaaaatagaattcaacaacacattaaaaagacattcaccatgatcaagtgggatctattccaggaatgcaaggatagtttaatacacacaaatcaattaatgtgattcatcacatcaacagaatcaaagacaagaagcatattatcatttcaatagatgctgggaaatgactcaataaaatcattatctcttcctaataaaaagtctcaacaacttgggtacagaaaaaacatacctaagcatgataaaagccatatatgacaaatccagcaggaatgtactaaataagaaaaaactgaaagcctttctgctaagatctgaaagacaaggatgtccactttcactacttctattcaacatagcattgatgttctagccaaagcaattaggcaagagaaagaaataaaaagcatacagattgaaaaggaagaagtcaaaatatacttctttgcagatgacatgattttatatttagaaaaacctaacaactccactaaaacactcttaaaatttagctaactatatagaatttggatctgtaagactgagaactgggcatcagatagaatcaactacagaaggaaacaccaaaggagatgaaataacccttttgtaacagccctccctgtgccacacggagtcaaggaaccagagttctcagaagctagaaaacagtgttgtccatcatgataaagactttgcctttgtctgagctgcagcaccactggaaggtgaaaggataaactagtacaagtctaaaggatagacaaaagggggcaaataaagatttctgttctgaggtcacagaattcaaacttgttttcccacagaactctcagatttgcatagagtttcccaaacactatttaataaacggcattttctctacccatctgaactcttacctgtgatcacagctttgatccattcccatccatctgggtttcctgctatttgtacttggctctccaaagtgaaaggctccttcccttgctccaacatagagataatactgaggtcaaaacaagagattcctgcttatgaaaagaaaggaaaacaatgggctgtagattttccagagtcccagtcctatgtttacatgaggagggaggactttacagctgtatctaaaaaaacacttcaaaaattcatccactaaatgcttctttataaattgttaggaaacactataatatgcaaatatatagctctcatcccaaaaccactgaatcaaagcatggggatagaaaacagggaattggatattttaaaagtcctgaaaccctccagtgacatcaggaagaggaaaattaaaatccagtttccacattatggagattttcatttttcagtcaacacagcttcagtctcagccaagcaatgcatgagctcccaggagagccacatggaaaatgaaaagatacacaggggcagatcctgacttctggaagaaagtcatcctcacccagggaggccaggttcctataattctccaacatcacgtccctgtacaaagtcctctgagcggggtccaggcatgtccactcctcctgagagaattctatagccacatccctgaatgtcacctgtccctaaaatgaaaaacacatccaccagggggatataaggaaaagctccaatcttcacataaaatgagaagacagaatagattaaactggagtaagtgggccgatatccaagttgtgatataataaaatatacatatggtcttcatccccctttcctgacatacatctcacttggaatctctggagtgataagtgcctttgtaagctaatgagatgactggtggctggaggccccaagatagtttcagaatggcggggtggtcaccagaaagaccaaggctggattacagagttgggacttcgagccccatcccccaacttaccctgaggggatgggggctgaaggctcggctgatcaccagtagccaaagatgtaagcaatcgtgcccacttaatgaagcccccataataacccgaaaggacagggcctgaacaagcttcaggatagggaaacacacggaggctctgaggacgcccccaccgacccccaccaaagacagcactcagcctcccaagtagttgggattacaggcatgcaccaccacgccatgctccttctcccataccttacccaatagactgcttacatctggctgttcatctgtatactctgtaatatcctatataataaatgggtcaatataaataaagtgtttccctgatttctctgagccattctagcaaattaatcaaacctgaggagggggtcatgggaattcatgatgtataagccagtcagtgagaagcagagaccatctgtgtttgcaactggcattgaagtgggcacactcttgttggattgagccctcaacctgtgggatctgatgctatgtccaggtagacagtgtcagaattgaactgaataggaggtcactcagctggtgtccagtgcagaattgctcccttggtgtgtgtgggaaaacccaggacatctgggatcacagatgtgttttccgttgtgagagtacagtaggagaaactgggtctgttttcaccacatcctcacacacacaggtatttttgggcagaatgtttccttaattctgtcttcttatactcttctataagaggttatgatagtctttaaatcagtgttgatttctcagttttgtagacaatacaaaaaatacacaaatatacaaataaaaaaccaacaccgggttatctttattgaagtgctatatattatgtctaacacaccaagtgatattcagtatttagatgatctagagcatgagtgatgtcttacgagatgaaaatgtgtacagtgactttaaagaaaggtcagaatctaaaaactgtgatcatcgcaataacaatgacagatgtttctgagcacttcccaagtgcaaggcattattctatttatttatttacttacttacttatttttttgagacagagtcgctctatcacccaggctggagtgcagtggcatgatctcagttcactgcaacctctgcctcctgggttgaagcgattctccggcctcagcctcccaagtagctggaattacaagcacccaccaccacacccggctaatttttgtatttttagtagagatggggtttcaccatgttgaccaggctagtctcaaactcctgacctcagatgatccacccgccttggcctcctaaagtgctgggattacaggcgcaagccactgtgctcagtctggcattattctaaataaatgtcctgcatgtactaacttgtatatgaatatgatagcccatgagagaaagatctgttcccatcttactagcagataaatgtatatgacagacactctaagaaacttgcgtcaagacaaagagctaaaatgtcagagcaagcatctgaatccaggtgtctgggaataagaattaaacctaaagaatcaaatagttggccaggcgtggtggctcatgcctataatcccagcactttggaaggtcgaggcaggcagatcacgaggtcaggagatcaagaccatcctggctaacatggtgaaactccgtctctactaaaaaaatacaaaaaaattagccaggcatggtggcgggcacctgtagtctcagctactcaggaggctgaggcaggagaatggcatgaacccaggaggcggagcttgcagtgaaccgagactgtgccactgcactccagcctggatgacagagcaagactgtctaaaaaaaaaaaaaaaaaaaaaaatcaaatagttaagtaaaagaacatgaaaaggatctaaatgagcaaagttgaaacaagttcatgaataacaacatggaacttcataaaaggtaattacatatatacacacatctatttatgcccataatatgtaactattcttactattaaatcattaatgtgatagctgagaacaaatttaaggacacagaaaatatttaagatacaatttgaattgctaaaaaacacaaaacttatttaaaatcatgatgtgtgggctgggtgcagtggctcacacctgtaatcccagcacttcgggaggccgaggagggcggatcacgaggtcaggagttcgagaccagcctgaccaacatggtgaaacaccatctctactaaaaatacagaaattagccgggtgtggtggtggacatctgtaattccagctactcaggagggtgaggcaggagaatcgcttgaacccgggaggcagagattgcagtgagccgagattgcaccactgcactccagcctgggtgacagagtgagactctgtctcaaaaaaaaaaaaaaaaaaatcatgatgtgtgcttaataaaaaaacacgcactcacgtcacatatacacagtttagtaataacaacagtgaaaaggtaaaacatccactctgtcctcattcagagaaggctccaataaagatgtagaatgagctatacatctttcctaacatgaaaacatgtaaattttcaaaatttgcaggctaaaatgtcacaacaaaacattcactgaagggccgggcatggtggctcacgcctgtaatcccagcgttttgggaggccaaggtgggctgatcacttcaggtcaaaagtttgggaccagcctggccaacatggtgaaaccttgtctctactaaaaatataaaaactagctgggcatggtggcatgcaactgtagtcccagctactttggaggctaaggcgaaagaattgcttgaatccgggaggtagaggttgcagtgagccgagattgcaccactccagcctgggcaacagagtgagactctgtctcaaaataaataaatacaataaatagaatatttaataattggtaaaacaggccgggcgcagtggctcacgcctgtaatcccagcactttgggaggccgaggcaggtggatcacgaggtcaggagttcgagaccatcctggctaacacagtgaaaccccgtctctattaaaaatacaaaaaattagccgggcatggtggcgggcgcctgtagtcccagttacttgggaggctgaggcaggagaatggcgtgaaagcaggaggcggagcttgcattgggctgagatcatgccactgcactccagcctgggcgacagagcaagactccgtctcaaaaaaaataaaataaaaataataattggcaaaacaagaacgtggttctaccctctctaatgggaaagaagttctgctcctataaccgaacaaaataataaccactctcacctagcaccagttgcacaagggtccctgcagaaacaccagtctccattgtatgggttttctgaaaatagttcaatgattctcctgcattttccatttaggttgatttcatgtattaaaatagatgatgggatgaaagaaccctctgtcactgatgtctgtcagtctaaaattcccattccattcccagtcattaataagagtttggggttagaaacacagtgactcacttggtgagcttcaaatgtaatgtaaatgagccagaaaaatttccccttattagccttattttacataatttagcaagtatttgtgcacattaacacgtgacttccacgtgcagctgctctaatcctgctccacagagagctgacagtgcatccagatgtggcccctgaacaatccctgctgcccaacagcactgacaccacaggaccctcaccccgtctccatccatgtctgggtgtgagcccttcccaggaccatgcccagtgcagcctcttcccaagctcatgtcactgggtcacgagagatggaatctaagtgagatgagagggactgagggaaggcacgcgtaagtgcgagcaaacctgtcaggcaggacgcttcagactcagagaagattcccaacttcaaagaatgacatttcaagaagaaataagagacagaacaatccactgataatattaccttacctgggtgagagccatgcctgacttgtctttctttcctcttcctcttcttcaagggttcttccttaggtaacaggaaagtgcctttagaagtcaatattgaatatccaaaatgtgctgtttattgctcagaatcaacacatccccttcctatgccacaatcacacacacacacagggaagacctcaccctgtggaaagatggtctcagctgcccactgcaccagggcaatgcagggacaagaagctcctatgggaagatcaataagtgagtttctgacccctttcttcagaacccactctcctcctggagaagcccacacacacgctgcagcaattgggagctgggctggactgagctcccccattcagggcacagaccaagccctgaccaaaccccatgcagagaacagcctccctcacctctctgtggattgcaggccaatctcaggcctcagaaacaaaaggtagaggctgaacgtggtggctcacactataatcctagcactttgggaggctgaggcagaaagatcagttgaggccaggagttcaagaccagcctaaacaacatagtgagaccccatttctcttaaaaaaaaaaagtaataaatttagccaggcacggtcactcacgtcttgtaacctcagcactttgggaggcctagatgctggatctagagttcacaggagaggcctgcaggtgacatgaagctgtgcaggtggggttgaaagccatgagctgagttgataaggaaaggcaatgagtgcggacagagaaaaaagtggctggaggactaagcccacgttcagagaacagaaagttctggagacacaagaagaggaaagcataatgtgattagggaggcaacaagaaaattacaacaaatagatgtgtaaagcttaacgggatgtcctaaaagccaagaaaatagaagagaaagtgagcaactgtgccacatgctactgataggaatggaaagatgacaggaaattaaacattgaatttcaaatggatccatcactggtaaatgaaaaagaaaggatcagtggaatgttgggtatgagagcttgattcaagcaagagttcaagcaaggactgaaggcaagaattgaacataaagtaaaaaaaaaaaaaattgtagtgtattgtgctcttaaacggagcatagaagagtacttactacagactgaaaggtagtttagagttttgttttgtttttttttttgagatgaagtctcactcttgtcacccaggctggagtgcaatgttgcgatctcggctcaccgtaacctccgcctcccaggttcaagcgattctcctgcctcaacctccagagtagctgggatcacaggcgcgtgccactatgcctggctaatttttgtatttttagtagagacagtgtttcaccatgttggccaggctggtctcgaactcctgacctcaagggatccacctgccttggcctctcaaagtgctgggattacagccgtcagccaccgtgcctggccaatttagagtattttttgttttaaagatggagcgtagaagaaaaaaagactttattctgtgtgtgtgtgtgtgtgtgtgtgtgtgtgtgtgtgtgtgtttgttttttgtttttgagacagggtctcactctgttgcccaggctagagtgtgacagcatgaacatggcttactgcagcctcaagctctcgtgttcaagcgattctctcacctcagccttgcaagtagctgggagcgcaggtgcaagccaccacatccagcttatttttttctatttttcgtagagacggagtcttgctatgttgcccaggctggtctcgaactcctggactcaagcaatcctcccaccttggcctctgaaagtgttgtgattacaggtgtaagccgctgtgcccagccctgtgtacgtgtcttaatggagaacaccactccctaggtacagggatgaattcccttgaagttaaaattttgaaagctttacagattgtgaaggaaaaaaaaagttaaaattgatggcacgcatattgtcctgagactgtgagtgaggctggtacatggtacacaattgcagggccagcagcagccagaagcaggaacaggccattcccagtcactactgagtagagatcacaggtcctgacaggtgggtgggccacttggaggtcttttcctttagtctttgagataggaaaaaacccaactctacattctgctctcacactaaacacagaatacttcacctctagtcaccaaaatgtgtgtgtggcttttcccacaatgaccaggggactcccaggggactcccagctcgggggggggggggggttaggcgggggtcctacaatttcattcaactctgatattatctacaagacagcatgggccgggcacagtggctcatgcctgtagtcccagcactttgggaggccaaggcaggaggatcacttgaggccaggagttagagaccagcatggccaacatggcaaaacctcgtctctactaaaaatacaaaaattagctggatgtggtggtgcacacctgtaatcccagctacttgggaggctgaggcaggcaggagaatcgcttgaactcgggaggcagaggctgccttgagccaagattgcgccactgcactccagcctggacaacagagcgagactgtttcaaaaagaaaaaaaaaaaaagactgcatgacgaggtgctacaggttcagagctcagtctaaaactgcccctcacttcagacacagtatgccagtggtaactgtcacttatacttttgagtgacctgataaatactgtggttctcttaacccctcctcggctttgattaactttctaggacagctcttccttctgactgttcatctgtatcttctgtaatatccttcataacaaatgtgtaaactaagtgaagtgttttccctgagttctttgagccgccctcacaaattaatagaacctgaggtggtggggagggggatgtcaagggaatccccagtgtatagctggtcgctcagaagttcaggtaccaacgggagacttacaactggcacctgatgcgggggcaatttcgtggaactgagcctcaatcagtgggatctgatgctaactccaggtagagagtttcagaattgagttaaactatacgacactcagttagtgtctgatagagaacgggttgttggtgggagaaatccgcacacattttcgtgagtggaggcgagacactgtgtagaatgtgccctgttgtattgagtgtgacaggaaagaaaatcaaaggaaaaatattttttcctcttagttcatacactcgcccacaccctaccctattccaggaaaagggaagtgggtggactcaaaactaaatgagcgaagtcactgccctctggtttgaatagtgattgcaaatgaagctataccctaatactaataattgtcaaatgcacgtgttacgcattttacataaaggagtttcttccattctcatttgcaactgcataatttaagtaaacgtattttaaatgtgttgcattattttaaacccagaaaccaatgtcacaatgtcatcatcacatctaatcaacgcaccactcacctggactcagggtccctctcttgcttccatactgtgtgtttccctccctcatcctctacatagctctcattctcacattagcttattttttattttctgtgtttttcccctggttctttgcgcgtcgttctgagcccctctcatctcctgctatttctccccttcttcctccgcttgcacctgttctgtcccattctggggccttgtttcaactctgattcctctttctccccagtcttttcattgtccccagtctccatatatttctgcctctttcttctcccatctctgctccctctgttgaatctcctcttcccttctacacctcttgccccactctctggcacccccagatcccaggcctccccctgctgtggttctccttctgctctcctcgtcaccggctgtcccctcttgctgtcccagcaccacgctgcttgtctgccctggctccaaatccctcctcctctcccggactctgtctgaggagcctcccactttctggccctctccctaccttgctgtccttcatgtctctggacatcgagcttttctctacatttccccagttgcttttctccttctgccttctcagctccttctcttaccatctgcaaatccctcgcccatcctctactttgccatctggttacgggtttccctcactctttcctctcagtttttctacttctctctctgtctctgcccctttctctacctgctaatccccttggtccacacattcacaggaaggtttggactaagacgcctgcatcttggaggagcgcattttccaggggctggagctgggcaggcaagaacaccgggtgtcacaggacaggccccgggcacctccccagcgcgggctcaggagaagcggggactgcgaaggggaggcctggggagcagcagggcccggcacgaggaggagggaggtggcggggcgacggcgccttagaagaggggtggggtctgcaggatgccaggaccaggcagaggacgcggcctcgccggtaccggggctgaggagctgcgctccaggggccgacgagggcgaggctgggaggcacccagggcgggaatccacctcgcgggcgaggactttaaaaagcccggggcgggaggaggggtcaggaaagggttttaagcgggaggaagacgcgaaaggccggggacagggagaagcctcagagctacttcaacccaaagagaagcgactccgaacccacaccgcgagtcagctggggtggagggcgcggtgcggggatcttaaggtctgtagctgccgggcgcagtggctcacgcttgtaaccccagcactttgggaggccgaggcgggcggattacctgaggtcaggagttcgagatcagcctgggcaacacggtgaaaccccgtctctactaaaaatacaaaattagccgggcgtggtggcacatgcctgtaatcccagctactcgggaggctgaggcaggagaatcgcttgaacctgggaggcggaggatgcggtgagccgaaatcgcgccattgcactccagcctggacaacaagagtaaatctccgtctcaccaaaaaaaaaaaaaaagaaaaaaaaaaaggtctgtagcgagcccgggaactggctgcggaaacggggcacggcggttcgcaagtttaatccatactgagggacactcacgctcggcggcgtcacccgcacccaacacgatccgcttccggaactgcagaaaactgcgcgtgcgcggaaaagagcccgggcactctgggggcggggcctggggagaggcggggtctgcggacgaaacgctggggcggagctggggcggggtctgcgcttccctcagcctgcctagcccgcagtctcatttttcccggtttagaaacgctggagtgttcactatgtccccgggagcaccgttccaatttgaagcagttttaaggtgaaagaatagacttacgtggaccacttatgatagaaaccaaaatgatttcctcttaccaagttgaaaacggtttatgttaaaattgtttgccggcgggttggacccagtcctgctagggagtctgctgcagctcaggaacggggatctgggaatcggggatctcggtctgggaactgggatcttagtggaggatccacgaggcacggcgattggatccagcaattcctgcaattaaaatgtatttaatttaactaaaatgtctggaaattatctctgaggatgattcaaagtagaatgggaaatgcagcatcctacctggacggatatgcaatttaatgcagtagcccaacagaacctcctttacatttcaaatccccattctccccagtggaagagtcaagcctgtgctcaattcatgggaaggttaaggccgataagttagatcaccaagggctgctttattgttctttaaaacatatatttttgtaaagatgggagtctcggcccaggctggtctccaactcttgacctcaagcaatcctcctgcctgggcctccaaaattgctgggattacaggagtgaactactgtgcccagtcaactactgatttaaaccatgtgaatttttaaaaaatagagataaactgcattatttttgcttatattcgttattccgttccacacttgaaatgacttaaccacaaacaactttgacataatctttctttgcatcaaaatatgcttaaatcaataatttctaaatatcatgtaatttcaaattcactttatgggcattctgaagggaacttgacacagtactttttattttaaaattgtaatctatattgggtctatttttttgttttctgtttcttaatgttctatcagatgtggataacagagtgtggaaaatagtcaccacatgacaattggatttattttcgcctaaagaatagttttccagtatttctaacgtaccatcccagtacattgactgaactaaagactcacagggatacccttttttcatgtttatagagaacctagtttatacctgctattgtcttatgtacattttcatgtcacacaattttatctccaaacaacacccttatttatatacaccgtatagttttcactttaacaaaatattaaacgtttcatctgggttacaatatatgaaagaaaaaaataaaagggaaaatcatattaaaaaataaaaagtaattttactacaattgaacataaaccatgaaatatattgctcaataccataaactgaaaataacatttccatagcctttggagaaatgcccttccagtaaaactgcttaatcatatttattatgtaagaaacttttccacagattttcactgagttagtataaaaacatcttaggcattataactaaacaggatttcaaaaacattttcaacagttgtgttatttttaatgagtcctatgggtacagcggaagaataaatgtagaatattactatcaagaaaactagggcagggcgtggtggctcacacctgtaatcccagcactttgggaggcagaggcgggtggatcacttgaggtcaggagttcgagaccagcctggccaacatggtgaaactgtctctactaaaaatacaaaaattagccaggcgtggtggcacatgcctgtagtcccagctacttgggaggctgaggcaggagaatcacttgaacctgggaggtggaggttgcagtgagccgagatcacgccactgcattccagccccggtgacagagcaagcctccgtctcaaaaaacaaaacaaaacaaacaaacaaaaaagaaaactggggtcttcccaaaccaagaattcagaactttccagagtaaataattcagtgtactagcgtcagtctccattttgtgatgttgtactactaacgcttttacagctctgcacttctgttctgcccatttggtcaaactggtcatgcttgagtgcttcctcctttgtcactagatggacgttcaaaccacacaaagcttcctctaacccatccccacaccttatcaaccataacacaccaagcaagttgcttatctgggctctcaagccatttttagaccagctttggaagtctacccagctttccccagaaacccacattatgtaataaacagtctcataacacttctcaaccaacctttaggtgaagttcaatacagttccagtagagaggtcacaagttcaaatgatcaaaatgttatgagggtgaacatacaaactttgtcgtttatctgccaggaaaaaaaaaaatctgaatgtgttatgttctttcttaaaagaaaatttatatatattaatttttccaattgccactgagcattccaaaggtaaaaaagagatgttgttgtttttatccatattccccacagtttttttgtttcctaatatgtcatatttttactatacttgtattttcacttcaggtacatcaagataaatgccataggtgttatttggcatgcaagaaagagacatgcaaaaatataataatactgtgcatatgcatgaagagcaatgcagacttcagggtgtgagagtctgaaatatcctttctgtgggattttcattataccacataagtatcccaaggcagagtgtggagagaataattcaagtacaaaatacaattagtttctgggctgggcatggtggctcacacctgtaatcccagagctttgggggggccaaggcaggtggatcacttgaggtcaggagttcgagaccagcctggccaacatagtgaaaccctgtctctactaaaaatacaaaaactagccgggtgtggtaacgggcacctataatcccagctacttgggaggctgaggcaggagaattgcttgaacccgggagacagaggttgcagtgagccgagatcacgccactgcactccagcctgggtgacagaatgaaactccatctcaaacaaacaaacaaaaaaaccaaaatacacttagtttctgaaaattatatgttgtttgatccaacaatggaaatcattgttctagatccttcgatagcttaatggtgcagtgttgttatctgttatgaagtatgctactgaggtaggataaaactatgttggcaagaaatgattcattcatacttataaaatacatcaaattttattagttaaaacattaaatctatgatgcattcttaaatagtagcaaaatgtgattccagcagttaatgtaaatcctagtaacaaacatgggattctggttactttgattaaacttcttatgctcggccggccgggcacggtggctccagcccgtaatcccagcactttggcaggccaaggtgggcggattatgaggtcaggagttcgagaccagcctggcaaacatagtgaaactccatctctactaaaaatacaaacattagccaggcgtggtggtgcatgtctgtaatcccagctacttgggaggctgaggcaggagaatcgctaaaacccaggaggcggaggttgcggtgagctgagattgcatcactgcactccagcctgggcaacagaacaagactccatctcaaaaaaaaaaaaaaaaatcaatctttgctatgcaacagctattggcatttgatggagaaggtagcctccacttttctgcattatttgtaccacacatcagtccctaataagctattactctcctctaataaaaatccgagtgtcttcctggctctatttcatggtctactggtagagaatttctttctttctttttttgagtcagagtttcgctcttattgcccagactggagtgcagtggcatgatctcggctcaccacaacctctgcctcccgggttcaagcgagtctcctgcctcagcctcctgagtagctgggattacaggcatgcgccaccatgcctggctaattttgtatttttagtagagatggggtttctccatgttggtcaggctggtctcgaactcccgacctcaggtgatccacccaccttggcctcccaaagtgctggcattacaggcgtgagccactgtgcccggccagtagagaatttcttcccatacccacagtgctcttctgtcagaagaagggcacctgcagtgcaataaggatgatgagtgacatcatagttcatcatcctctgccctttccaagtgctctctaattcagactatatttaattttaaaaggcagagtcttttttcttcaggagcttggagagaaataatcctcacctaatgaagtgagtgagcccttccatcctttgattctttcccgaacaacaccatgttaggcgtataatcatgtataaaatcagcacattgcaaagttctggttggaagttataaatagtagccttttcaataaatcttaaatacttcaacaaaacattttataagctgaaagtaattggccatttccaaacatcctacaacctttgatatgtatcatgtaatgagttttaacacatttggacttctgattatgctgaagtatataatatcagagggttatgaggaaactagagactgagttctactcttcctatgaatcctcacctacagttgtggtccaggagtaatagtctcagcatgcatgttacgtttgtgtgacttcatcaaagatgtatcttttgatgcgtattgagctctgagacctggataaagcttctgtcatacatagtatattcacaggatttgaactctgatgtctgttaatgcttaaactcatcaggagtttgccacagtcactgtatttgtaagaattgtctcaagaatgaattctctgatgttgtgaaagaatttgtggctgaaaaactggccgcactcctttgtaaggttactttttttttttttttttttttggagatggagtttcactcctgttgcccaggctggagtgcaatggcatgatctcgctcactgcaacctccgcctcccaggttcaagtgattctcctgcctcagcctcccgagtagctgggattacaggcgtgcaccaccacacccagctaatttttgtatttttagtagagacagcgtttcaccgtgttggccagcctggtctcgaactcgagacctcaggtgatccccccgcctcggcctcccaaagtgctgggattacaggcgtgagccaccacgcccggcgtcctttgtaaggtttctatccactatgaattcttcgatgttttgcaaggtttgaattttgagtaaagaccttgccacattggttacatttgtaaggtttgtctccagtatggactgccatatgggtagttagggttgaacgaacactgaaggctttcccacactcattacacctataaggtttttctccagtgtgaattcttctatgatttgcaagatgtgaattttgagtgaagaccttgccacattcattacatttgtaaggtttttctccagtatggatgacctgatgggtagctaggtttgaatgtacactaaatgctttgccgcactcattacacttataaggtttctcaccagtgtgaattctctgatgaattgcaaggtacgaattgtgtctgaagaccttgccgcaatcattacatttgtatggtttttgtccagtatgtattgtctgatgtatagttaggcttgaatgaacactaaaggctttgccacactcattacacttgtaaggtttttctccagtatgaactctccaatgccttgcaagttgtgatgtttgactgaaggctttaccacattcatcacacttgtaaggtttctctccagaatgaattccccgatgacttgcaaggtgtgaattttgtgtgaagaccttaccgcagtcattacatttgtaaggcttttctccagtatgaattgcctgatgggtagttaggcttgatcgcacactaaaggctttgccacactcatcacacctgtaaggtttctctccagtatgaattcttcgatgatttgctaagtgtgaatactgagtgaaaaccttgacgcattcattacatttgaaaggcttttctccggtatggatgatctgatgcttagttaagtttgaatgcatactgaaggctttcccacactcattacacttgtaaggtttctcaccagtatgaattcgccgatgctttgcaaggtatgaattgtgcctgaagaccttgccacattcattacatttgtaaggtttttctccagtgtggattgtctgatgggtagtcaggcttgagcgaacactaaaggctttgccacactcattacacttgtaaggcttctccccagtatgaattcttcgatgacttgcaaggtgtgaattttgagtgaagcacttgccacattccttacatttgtaaggtttttctccagtatggatgacctgatgtgtagttagttttgaatgtgctctaaaggctttgccacactcattacacttgtaaggtttctctccagtatgaattctctgatgacctgcaaggtttgaaggttgactgaagacctttccacattcattacatttgtaaggtttttctccagtatggatgacctgatggattgttaggtttgaacgaacagtaaaggctttgccacacttattacactggtaaggcttctctccagtatgaattctcttatgacttgttagccgtgagttttgactgaagaccttgccacattcatcacatttataatgttttcctcgattattaggagacttctcaacttgattgtattcataaattttcccttcatgttgaaattgctgcagttcagggagatgtgactgaaagcttactccaagctgattttcaatatgcctgtttcctgcagcccttctatcacgttgagctcttctaccagggagattttctttttgcaacataagtactgttttataatttccttcatcatctttccactgacactcaaagtcgtatgtatttttctgaacttcctggaaggacaagcctacagtgtcacagctttcaagtctctccaacttcaccgtgtagaacgcttctcccatattgttcttcccctttggtggcaaatccgtgtttacacatttacaagagatatctgtaagatataaacaaccatagatttccagttaactatagtaggtaaataactatttcccattgaaaaacctaatgttacaccaaaagtaatagttatgttgaacagacttacgattcttcagaaccataattttccagaacacaaaaggaacaggattccttatcaaagaaaaggtggtaacatgtaattcaaatagtaggggatcctagttttaaacattctgtgaacaaaacactcatattgtgcaaacccatattagccctgaaaggagtatttttcaaccatgacccaaggctaccaattggcagtatattttatatggctgtcacagaattcaagagaaataattcttagattgtgcctatttaaagcatatttgttatgcataagtaaatgctgaagcacaacatgatatactctaatggcaaataactcacagcaaacatatgtaatgaataattaaagaactagtaattttgaattggaaaacaataatagcactgaaaaaacgaggaggaattcaattttaaaatgtcagaaaaaactatttttctgaatacctgttataaaactacatacccctatatacccacacagagcaaacattttgcaacattaacaagtggtatataacagttatatttctttctttctttctttcttttttttgagaaggacttttgctcttgttgcccaggctggagtgagtggtgcaatctcggctcaccgcaacctccgcctcccaggttcaagcgattctcctgcctcagcctcctgagtagctgggattacaggcatgcaccaccaggccagactaattttgtatttttagtagagacagggtttctccatgttggtcaggctggtctcgaactcccgacctcaggtgatccccccgcctcagcctcccaaagtgctggtattacaggagtgagccactgcgcccagccccaacagttgtatttcttacaaatggtaaaaaaccatcctctatcaataataatcgaaattaagaaaatattttagcaactcaggatataagcagtaggcaagaattagtaaccgtgtttacaggaagttatagtctgtggattgtcaacaatttctctctctttttttttggagacagagtctcgctttgtcacccaggcagtggcgcgatctcggctcactgcaagctccgcctcccgggttcccgccattctcctgcctcagcctcccgagtagctgggactacaggcgcccgccaccgcgcccggctaattttttgtatttttagtagagacggggtttcaccgtgttagccaggatggtctcgatttcctgacctcgtgatccacccacctcagcctcctaaagtgctgggattacaggcgtaagccagggtgcttggccaacaatttctcttgagaaaagaggagtctgccgggcgccggtggctcccgcctgtaatcccagcactttgggaggccgaggcgggtggatcacgaggtcaggagatcgagaccatcctggctaacacgatgaaaccccgtctctactaaagatacaaaaaattcgccatgcgttgtggcgggcgcctgcagtcccagctactcgggaggctgaggcaggagaatggcgtgaatccaggaggtggagcttgcagtgagccgagattgtgccattgcactccagcctgggcgacacagcctgactccctctcaaaaaaaaaaaaaaaaaaaaaaaaaaagaaagaaagaaagaaaagaggagttctacttcagaaccagcacaggatataagaactggaatataatttttttttatgaaataaaactgtctttatttgcagataacataatcatccttgagaaaattcaatatactctacaaaaatgctgctagaactagtgagtttagcaaggttgaagaatacattatcaataccccaaagaatcaattttatttctatatactagcaatgaataatcagaaagttttctaaaatgcagtttgcaatagctttaaaaacattaaatacttagagaaaagtccgacagcagatatgaagaacctatacactaaaaactataaaatattgcagagaggaattaaagaagacctaaataaatgaaaagctaaatatatcttgttcagcatttagaagactcaatattgttaaaacagcaacactccccatttagcctattgattcaacacaatcccaaccaaaattccagcatgtattttttgagaaattaacaggctttctaaaattcataggaaaatggaaaggatctagcataattaaaacaattttgataaagaagaaagttgtaacactatcactacctgctttcattataaaagtgtagtcatcaagacagtgtgattattgttgattagacaaatatcaaatagatcaatggaatgaaatagagaatactgaaatagactcacgttatatagacaactgatttttgacaaagaataaatggcaattccatggagaaaagacagtctttttaaaaaatggtgctgaaacaattagatcttcatatgcaaaaaaacccttttgtttatacctcattccatatagaaaaatatactcaaatagatcagatgaaaacctaatgtaaaatctaaaccataaaacttttagaaaaccaacatgaggaaaaatctgtggagccctcggatcaagcaaagatttcctagatatgataccacaatcatgatccataaaagaaaaaaaagaattaatttataaagacacactgttaaaagaatgaagactcggactgagggaaaatattcacaaagcacaaatctgataaagactttgtatctggaatatacaaagaactctcaaagttcaatattaagaaaacaaaaagcccaattttaaacattggaaaatgatttgaacatacactgcacaaaagaaaatattaatatatatagataataagcacattaaaagatattcaacatcatagtcattaggaaaatacaaattaaactactaaatgttgattagaaaggctggaatttaaaactagcaataccaagtgttaacaaggatgtgaaaaaactaaaattctcacacactggtagtgggaatgtaaaaggctacaaccactttggaaaataggttggatggctttaaaaaaaatttttttaatggaaatatttctttttttattattattactatactttaagttttagggtacatgtgcataatgtgcaggttagttacatatgtatacatgtgccatgctggtgtgctgcacccattaacttgtcatttagcattaggtgtatctcctaaagcctatccctcccccttccccccaccccacaacagtccccagagtgtgatgttccccttcctgtgtccatgtgttcttattgttcaattcccacctatgagtgagaatatgcggtgtttggttttttgttcttgcaatagtttactgagaatgatgatttccaatttcatccatgtccctacaaaggacatgaactcatcattttttatggctgcatagtattccatggtgtatatgtgccacattttcttaatccagtctatcattgttggacatttgggttggttccaagtctttgctattgtgaatagtgccgcaataaacatacgtgtgcgtgtgtctttatagcagcatgatttatagtcctttgggtataaacccagtaatgggatggctgggtcaaatggtatttctagttctagatccctgaggaatcgccacactgacttccacaatggttgaactagtttacagtcccaccaacagtgtaaaagtgttcctatttctccacatcctctccagcacctgttgtttcctgactttttaatgattgccattctaactggtgtgaggaatggaatataacttttttaaaaaaaacttttattgtataatggcaaactacaggtgtatatatttatggggaaaaaatgatgtcatgatgcatatatagaatgtggaatgatggaatcacgcttattaccacatccatcatgtgaaaaatgtgtcatttactcttgtttaattgaacctttgtgttgaaacgacaaacatcttcctaatctccccaaccccaccctcttgtaaccaacgttcttctttctatgagttcaagaggtttggattccacatataggtaagaaggtgcagtacttgtatttctgtgcctagattatttcatttagcaaaatatcctcggggtccatccatgttctggcagacagaacttccttcttttaaaggctacacagtgttccatcattttctttatccattcatctgttaatgaacacgtagtttgatttcataactcgactattgtgaacaatgctgcattaaacatggaatgcagatacgtcatagatatgctgatttaaatcctttggatctatacttgacccttggacaatgtaggggttaagaatgccaaccctccactcagttgaaaatctgtgtataacttttgactccccaaaaacttaaccactaatagcctacgattgactggaagctttactaataaacatataatgtcgattagaatgtatcttgtattttttatgttatatgtattatatactgtattccttttttgtttgtttgtttgtttgttttcgagacggagtcttgctctgtcaccaggctggagtgcagtggcacaatctcacctcactgcaacctccacctcccgggttgaagcaattttcctgcctcagcctcccaagtagctgggattacaggtgcccaccattaggcccagctaattttttatatttttagtagagacggggtttcaccatgttggccaggctggtctcgaactcctggcctcacatgatctgcctaccttggcctcccaaaatgctgggattacaggcttgagccaccgcatgcggcaagagatcactttttattatgatatgcaatttactggagagatgaactacttaaagatgattagcgttacagagtgtattaagcaaatacttgcaacacttgagctccatgtaatagcaataggaggtggctatgaaattgtatggcagtacactatgtactaaaattagttctatacaattatgattattatatctttacatttgtgtgtgtgtgtgtgtatatatatatatatatatattttttttttttttttctttttttagacggagtctcactgtgtcacccaggctggagtgcagtggcgtgattttggctcactgcaacctccgcctcccaggttcaaacaattctctgcctcagcctcccgagtagctgggattacaggtgcctgccaccacgcccagctgatttttgtactgtatgtcacatgcagtaagtgtgtgtataagttttaattttttatgatagatttgtgtttttattttgaaagagagtctcattctgatgcccaagctagagggcagtggtgtgatctcggctcactgcaacttctgtttccctggttcaagtgattctccagcctctgcctcccacctagctgggattacaggcatgtgccaccacacccagctactttttgtatgtttagtagaaacagggtttcaccatgttggccagctggtctcgaactcctgacctcaggtgatccacacaccttggcctcccaaagtgctgggattacaggtgtgagccaccacacccggccagatttgtgtattttttatggtggtaaataatagagtaataatttatgcattcatgacatacctaattttttcttaatttttataatatttttaggttatgcaatttgtctgctttttcaaattgttggaaatgtctttaaaaatttccaatatatttactggaataaaacccatatataagatgacccatggaattcaaacctgtgctgttcaagggccaactgtatacccagaagtgggattgctggataatatagtacttttatttttatttttttgagaaatttccacataatttttcataatgcctggactaatttacattcaaccaatagtgtatgagaacccccagtctccatatctttgctaacacatatcttttgtcctcctgacagtagccattctgacaactacgtgatattttatgctgctttaaatttttatctctgcaagtagtgatgttggctgtttgtctgccttccttcaagaactgtatattgaggctcatacctgtaatctcagcactttgggaggccaaggtggatggatcatgtgagaccaggggtttgagaccagcctggccaatgtggtgaaaccctgtctctaccaaaaacgcaaaaattagtcaggcgtggtggtgcacgcctgtagtcccagctacttgggaggctgaggcaggagaatcacttgaacctgggaggcggagattgcagtgagccaagatcacgccactgcactccagcctgggtgacagagcgagattctgtctcaaaaaaaaaaaaaaaaaaaaaaggaaataaaatgtatattgagatcccttggccattttttaaattggtttgttttcatgctattgagtagtttcgatttctcacacattttggacattaaattggtgtcaaatatacaaattgcaaatactttctcacaatccgtaggttgtctcttcattatgttaattgttccctttgcagtgcagaagcattttcagtagatgctaccccatttatctgtttgcttttgttgcacaagcttctgggctcaaggccaaaaaatcattgataacgtcatgtaggttttcccctatgattacttctagtagttttacattatcaggtcttacgtttaagtatttaatacattttgaatcaattttggtatctggtgtgagattaacatccatttcattctcctgtgtgtggatattgcttttttctagcaatacttattgaaaaaactgtccttgttttaattgtgtgttcttggtacctctgtcaaaaggcaactggccatatatccatcattttttttttcactctttttttttttttttttttttgagatggagtctcgttctgtcgccaggctggagtgcagtggcacaatctcagctcgctgcaacctctgcctcccgggttcaagtgattcttctgcctcagcctcccaagtagctgggactacaggtgtgcaccaccatgcctggctaatttttgtatttttagtagagacagcatttcaccatattggacaggctggtctcaaactcctgagctcgtgatccacccacctcagcctcccaaactgctgggattacaggggaaagccaccgcatctagcattttttactctttttattctgttccactggttgatgtgtctatttttaaggaagtactatcctgttttaattactatatcttcataatacagtttgaagtaaggtagtgtgatgcctccaggtttgttttgttcaatgaatcccatgctcaagtgtgaaaaaaacaggatacatgcccgatgtaggactgggatcaaagagaggacatttctgtccactgtacttaacaatttggctaaccatctcagaagatccaacccactccccttgtcacccacacccacaaactgtcacaaagtggaagagaagaagtagctgagacctcaacaggcaaggaaagcttaagacagttccgtgaagtttccggggccccaggtgcaaaggagaagcagccagtgttttccatctcttggaagtaggtcttccaagctcatgaaatgggataaagtatggatagaggcacttgccaaaactatggagtcctcacatctgtctctgtggacagaaaaataaggatttttgattgaatcaagcacagaaggagagactaaggaggagagcaacccttttgaaagggactaagagttcatagaaagccagtaacagacggttgtagatcatgaccaagactttgcatgtgttgctctttgggctgtagcgccactgcaggttggaaggatgaagttttacacatctaaagaacagggtattaagtggtagggaaaaaaattcttatcagtgatcacaggatataaacttttattttcccaaaaaactctcccatttgcagggtgtttctcaaacactgtctaatgagatgctttctccctgcccatctgaactctgacctgtgatcccacctctgatccactcccagtttctattgtctcttggttctccacattccagggctccttcccttgttccaacaaggagataatactcagatcaaaaggagagattcctgcttatgagaagaaagaaggccaggcatggtggctcacgcctgtaatcccagcactctgggaggctgagttgggcagatcacctgaggtcaggagttcgggactagcctggccaacatggtgaaaccttgtctctattaaaaatacaaaaattagctcggcatggtggctaaagcctgtaatcccagctactcgggaggctgaggcaggagaatcgcttgaactcaggaggcggtagttgcggttgcagtgatccgagatcgtgccattgcactccagcctgggtgacaagggtgaaactccgtctcaaaaaaaaaaaaaaaagaaagaaaagaaagaaagaaaaaaaaaaagaaatataatgtgctgtggcttttccagaatcgtacccttaggtttacatgagaagagaggaaactgtagacggatttggaaaaacatttcaacagttgatccacggaatgcctcctgagtggttaggaaacaccacactacgcagatatctagctttcttccatgaaccactcaatcaaaagcacagaagtagaaaacagaaaatcaaacattttaaaagtctggtacaaggtattatgcatacaaaactctaaaactctccacaaagtgggcagaccatctcgagaaacagcaagattaaagtccagatcctgcatgattaggcttttcatttatgagtcaacaggacatcaatcctcatcaagcaatgcaggggctctcaagagactcacaagggaaaatgaaaacatacacgagaacagaccctgacttctaaaagaaagtcatcctcacccagggagaccaggttcctataattctccaacatgacgtccctgtacaaagtcttctgagcagggtccaggcatgtccactcctcctgagagaattctatggccacatccttgaatgtcaactgtccctaaaatgaaaaacacatttcaccaagtgactatgaggaaaatttgaatcttcacataaaacaagaagaggagagagctgtaagaataggttcaattcacgtaagcagactgacacatccaggctgtgatcacggtacatacagatttgatcttcctccccttttcctgaaaagggctcacttgaaatctgtgaggtgataagtatctttttgtatgtcagtgaggctaactggtggctgaaggctgctagatagcttcagggtgtgggctggacactggaaagaccaaggcaagattacagggttaggctgggagccattgctcatgcctgtaatcccagcactttgggaggccaaggccagtggatcacttgaggtcaggagtttgagacaagcctggccaacacagtgaaaccctgtctctactaaaaatacaaaaattagccgggcatggtggtgcgtacctgcaatcccagctactcaggaggctgaggcagcagaatcacttgaacctgggaggcagaggttgcagtgagccgagatcacagcaccacactgcagcctgggtgacagagtgagactctgtctcaaaataaataaataagaataaaaataaataaaagattacagggttgggacttccaggctcaatctccaacactgcaaaagggaagaagggctgaaggttcagttgaacatccatggccaataatgtaaacagttatgcctatgtaatgaaccttccacaaaaatgcaaaaaattaaggttctgaggagcatctgggacagatgataacatggaggctccttgagtggtgcacccacagagggcatggaagctcagagccccttctccctatctcacccaatagatcgcttccacctgcattctttgttatatcctcagcaataaatgaatcaatatgaatcaagtcttcccctgaattctgtgagccactctaacaaattaattgatcccaacgaaaaggtgatgagaatttacaacttaagccagttagtgagaaacccaagccacaatctgtgtttgtgaatggcaatgaggtggctgcacccttgtgggactgagccctacacctgtgggatgtgatgccatatccagacagtgtaagaactgaactgaatgggaggacacccaggtcatatatccacggcagaactgcttgattgatgtgatggaaaacccaacacatctgggagaacggaagcattctgtgttgcaagagtacagtagaagaaactgaatctggctgggcatggtggctcacgcctgtaatcccagcactttgggaggccaaggcgggtggatcacctgaggtcaggagttcgagacgagcctggccaacatggcaaaaccccgtctctactaaaaatacaaaaatagccaggtgtggtggcaggcacctgtgatcccagttacttgggaagctgaagccggagaatcatttgaagccgggaggtggaggttgtggtgagctgagatcacaccattgcactccagcctgggcaacagagcgagattctatctcaaacaaaaacaaaaacaaacaaacaaacaaaaaactgaaccagtttttccctatattctcacacactaaaatttatttgagcaagttatgtctgtttaatcctgtttcattattcttttccctaagaggttatgatatcctctaaattagtgtggatttgttttgtggacaataaataaatatacagatacaaaatcagctgggctcagtggctcatgcctgtaatcctagcactttgggaggccaaggtggggtaatcacttgaggtcaggagttcgagaccaacctggccaacacagtgaaacgctgtctctactaaaaatacaaaaattagccggaaattgcttgaacctgggaggcagaggttgcagtgagccaagattgtgccactgcactccagcctgggcaacagggagacaaacaaaacaaaacaaaacaaaacaaaacaaaacaaaaaaacccagcacaagtttatctctaccagtgttagatagatattatgtcggacacatcaagcaatattcagcatctagatgacctagagaatgagtggtgtcttcaacgatgataatatccacagtggctttgaagaaaaaacaagtcagagccttaaaactatgatgagagcaatagcaatgacagggatttaagaacaatgcccatatgcaaggtagtattttaaatcctttacgtgtactaacacatacaacactgtagcccatgagagaaagatctgctcccattttactgtggggacaactgtttcacagacacactgagaaacctgtctcaggtcaaaggactaaaaatgacagagcaagtacctgtacccaggtgtctaggaattaaaattaaacctaagcaatcagttaagcaacaggcaagctacctgaaagagcagctcgcaatgccctgaataatcttccaaagagggtaagtaggcggtttggaatgctaaagcattaaggaaggctacatagtcaagaagagccttcagagttttcattttagaatctcagtgtctgagatcagtacaaaggagtcaatgtatctgtccaaggttctgaaagggtggtcattttggaagaattcatttatgtaacgacgtgtaccaatgtctaatagattcccaacatccttttgtgcaacatctatcagcagctgctcacgttctactgtgaatgactgacatgtagattggtctgaatagtttcttggtcattaaactggttagaaaagaactttcccagtcttttagatgctacactgtggctgaaatcctctgaactactgtgaaaatgaggtttacaaaataaagaaattggccaggcatggtggctcatgcctgtagtcccagcactttgggaggccaaggcaggcagattgtttgaacccaggagtttgagaccagcctgggcaacatagcaagaccttgtttctacaaaaaagtaaaaattattaaaagtaaaaataaataaatacaaacaaataaagaagtacaagaaatgagagaatgttggagaatgaagggtaaaatgatgtcgagcaaaactggccacagaatgtgttaatatattcaagttcaaatagtgttttatgaagaaagagactttaaaatctcaggggtaagcaaatttaaactgaaaacagaataaaaagtcctagaaagatacagtaaaaagtagtgtctgtctctttgcataaagtagtataatatagtttgcataaagtagtataatatagtttgcacgcatttggaagacaaccagctggcaggggaattatctcaaagaactacacaggagccaaatgagattatcaaggacaacaaaccacttcctttattacaaggtcacacttatagaaaaaagcacatgtaaaaacctaatttcagcactgaattcaggactttctcactggaaatttgggtagaatcaaaagagaaaacaaagataaaagtggctatgagttttggctgagcacagtggctcatgcctgtaatcccagcactttgggaggccgaggcgggtggatcacgaggtcaggagatcgagaccatcctggctaacacggtgaaaccccgtctctactaaaaatacaaaaataaattagccaggcgtggtggcggacgcctgtagtcccagctggtcgggaggctgaggcaggagaatggcatgaacctgggaggcggggcttgcagtgagccgagatcgcaccactgcactccagcctgggtgacacagagcgagattccgtctcaaaaaaaaaaaaaaaaaaaaaagtggctatgagtttatgagttttgtataaatatgtaaatttatttcttttttttgtttttttttttgagatggagttttgctttgtcacccaggctggagtgcagtgggttcagggagcttccagagggctgacatgtggaggttcctggaggacggcatacccagggagggcagggaagctctgcgcccctttccccatacctcaccttatgcatctcttcactggtatcttctgtaatagtatttataatcaaccagtaaaactgagtgtttctctgacctctaagagttgctccagcaaataaatccaacccaaagaagggttcatgggaacttcaacttgaagttggtcggtcagaagtttcagaggcctggacatgcaactgggaactgagccatcaatctgtgagatctgacactatcttcatgcagacagtgttggaactgaactggaggacagccagttggttgcttgctgtttgttggtggggagaaacccctcgcatttggccacagaagtcttctgtgtggattgtggtgttggtgtgagagcagaggaaaacatggtttttgagttgtttttcctaaacagcaccaaaagtaaattaacatgaggtcacctaactgagaaaaactgaaacaagttcaaggctaacaatatggaatttcaccaaaggtcattatatacacaaacgcatttatgtccatatattactatcctattagttcattaatagataatagagaacaggctgggtgtggtggctcacacctgtaatctcagcactttgggaggccgagttagatggatcacctgaggtcaggagttcgagaccagcctggctaacatggtaaaaccccgtctctactaaaaatacaaaaattagccaggtgtgatggcagacacctgtaatcccagctactcgggaggctgaggcaggagaattgcttgaacctaggaagcagaggttgcagtgagccgagattgcgccccttcactccagcctgggcaaaagagtgaaactccatctcaaaaaaaaaaaagacagtggagaacaaatttaaggccacagaaaatatttaaaatatgatttcaaatgataaaacacatacaatttatttaaatgatggtatgtcttttataaaaccatgggtgtatgcatctacatattcatgtgtgcacatcacatataccagttaaattaagtgaaataaggagatgtgtctcaatgatgtatttttttttatgacatctttagttgtcttttttgctcatgtgcttttcagaaagtctgggacaactgaaatgcatgaattgtacttgatttagtttacaaacatttttgtaaattaagctgtaaaaacgctaaaacaaaaatatgtaagaacttgtactccaattggtattaaatacaaatattaaaagtacagataccatttttttccagttaaatttagatatttaggcattaacaaaagcccaatggaggttttagtttattttactcatgaaatcctaagattaggacattttttaatatcatacatgaatagatttcagaagtacatattgcaacaatacttactcaaagaaattattggataattaaaaatcagtccaaaaaggaaatttgaaaaacacccaaaagctaatattaaacaagaaaatttcaccaaacatcataatcaagcagtaaatgctggatgcatttgatctaaattaaaatggagaaaatgggctgggcatgatggctcatgcctgtaatcctaacaccttgggaggccaaggcgggtggattgcttgagctcaggaattcgagacgatccttggcaaaatagtgagacccccatctttacaaaaaatataaaaattagctgggtgtggtggcatgcacgtgtagtcccagctacttgagaggctgagatgggaggctggcttgagcccaggaggtggaggttgcagtgagccgagattgcaccactgcactccagactgggcgacagggccggaccttgtatcagaaaaaaaaaaaaaggagaaaatgggggctcaccaaggctccagctaaagcccacttcagagcatgcctgagctgagaccaagaaaaaggtaaagtaggagctggatctgttaaaactaacagatgacatactcacaacccaggagaagaatgcattgaagtttaagaactaataacaatactgtgaaaacaatcttcattctttctttagcagctctcattagacacaaacacacaatgcatctcacgagtacattaggaattatacaatgctacctattaaaatacgtttccagacctatttaaagaaattataagactgtactaaagtgatgatgtcaataaaatagaggactagaactcccaaacactacctccaccacggagacacaaatgtagtagcaatatatgaaccaattgctttgtgagaaacccagtggtcatttaagaggttggaactcttaacagaagtctagtaggaaaatacaggacatctgctcccagaggccttaccctggcatgatgcagtgtcactgcaagaaaaacaccaatttcccatttctcctgggagaggaaaagtatgaaaacattcatccaatattctgtcttttcagggcgctgcctgagggataagtttctctcttggttgaatataagtaatgaaggccgggcgcggtagttcacgcctgtaatcccagcactttgggaggccgaggcgggtggatcgcttgagctcacgaattggagaccggcctgggcaacacggtgaaacaccatctctattaaaaatacaaaaaaaaatagccgggcatggtgatgcatgcctgtagtcccagctacgcagggggccatggccagagaatcacttgagcccaggaggcggaggttgcagtgagctgagatcgcgtcactgcactccagcctaggcgacagagcgagactctgtctcaacaaaaacaacaaaaaaaaggagtttggagtcagaaacacagtgactcacttgttcggcatcaaatgcaaatataaatgaggtgacaaagctttccccacagtcgtctcattttacagcatttcgtgggtgcttgtacacactaacatctgacttcataaccagcttctcttatcacagtttacacagagctgtcaatatattcaaatatgtcctgaacaatccctgttgcccaacagcactgacaccacgggaccctcaccccgtctccatccatgtcggggtgtgagcccttcccaggtccatgccccgtgcagcctcttcccaagttcatgtcactgggtcaccagagatggaatctaagtgagatgagagggactgagggaaggcacgagtgagtgcgagcaaacctgtcaggcaggatgcttcagactcagagaagattcccaactccaaggtccaaggtttctgaaaggaaggagacagaacaatccaccgagaatatcatctcacctgaggaagagccatccctgactcctttgccttcctcttcctcttcttccagggttctaccttgggtaacatgaaagagactttagaattcaatcctgaatgtcaaaaatacgctgtttgttggttagaatcaacacaccccctccctgggccataaccttatacacagggaagaccttatacacagggaagatggtcctctgctgcccactgcaccagaaaagatgcagggatgagaaactcctacaggaaaaacaagtgagtttctgacctctttctttagaacccactcccctcctggagaagcccccacacaggctgcagcagtggggagctgggctggaatgagcttctgttcggggcacagacccagccctgaccaaaccccatgctgagcacagtccctctcccctctgtgagtcataggctgatctcagccttcagaaatgatcagcagtgccctggtgctcaatagtagatacagaataacagaacagaacaaatcttaaatgtcactgaagctgggctgcaacttatctgaatgaaaatctctgctaagggggcgtaagagatgtatttgcaaaatgcctcagcattcttgagctccactgagaggggccgagcccagcacagcccccccaccttctggctgtactttccctgggggccttgtcatcaggatccagacagtggaaggtgaagcagcacagagaaacacgcagaacagccaatacagacaagaggtgagggtgggggtggggatggaatgctgaagcgggggtcagggagagggtcacggaagtccccactgaggaagtgatatcagaacaaagacctgggttaggaagggtgtttgcacctgcacctgaggggccagagtcctaggcagagggaccacccatgtgaaggccctgaggcaggagcaacttggggaccccggaaaaggaaaggggcctgagtggctggagcagagggagcaaggaggcacaggcaggagacgaggtcagagaggtcctgggggagcaggtcagggagggctgaggtcttcaaacagtttttctcccacacctccaaagaatgtttaagctgggcgcagtggctcttgcctgtaatctcagcactttgggaggcagaggtgggtggactgcttgagctcaggagtttgagaccagcctgggcaacatggcaaaaccccatctgtaaaaaaggtacaaaatttagtcaggtgtgttggtacgtgcctgtagtcccagctacttgggaggctgaggtaggaggatggcttgaggacaggaggtggaggttgcagtgagccaagatcacaccactgcagtccagcatgggcgacagagcgagaccctgtctcaaaaaaaaagactagaagaaataataaataatttttaaaacactggatttctttaatccacttatcttatttttaactcgcaaataatgtcatatcttctctattttaaatacatgctgacatgttcagctaagccccaagaagtacagggtggcccccatccaccctgggtctgctggggaacacctttgggggaattcaggatgacccttttggacatacgaaggtggagatgcctgttccacctcccagcagagtgttgaggagacaactggacaaaggattccagtgttcaagggagaagtctgcagggaacagggagccgtgtaggtgggtttaaagctgtgagatgagatgataaggaagggcatgggttgtagggtccggccccacaggattggtgggttttctcctcgtgtgtggagacgagagagcttagaaataaagacacaagacaaagagataaaagaaaaggcagctgggcccgggggaccactaccaccaagacgtggagaccggtagtggccccgaatgccaggccgcgctgatatttattggatacaagacaaaggggcaggataaggagtgtgagccatctccaatgataggtaaggtcacgtgggtcacgtgtccactggacagagggcccttccctgcctggcagccgaggcagagagagagaggagaaagagagaaacagcttacactattatttctgcttatcagagactttttgtactttccctaatttgctactgctatctaaaggcagagccaggtgtacaggatggaacatgaaggcggactaggagcgtgaccaccgaagcacagcatcacagggagacggttaggcctccggataactgcgggcgagcctgactgatgtcaggccctccacaagaggtggaggagcagagtcttctctaaactcccccggggaaagggagactcccttccccagtctgctaagtagcgggtgttgttccttgccacttacgctaccgctagaccacggtccgcttggcaacggacgtcttcccagacgctggcgtcaccgctagaccaaggagccctccggtggccctgtccgggcatgacagagggttcgcactcttgtcttctggtcacttctcactgtgtcccctcagctcctatctctgtatggcctggcttttcctaggctatgattacagagggaggattattataatattgggataaagggtaactgctacaaacaaatgattaatgatattcatatataatcataactaagatctatatctggtataactattcttgttttatattttattatactgaaacagctcgtgtccttggtctcttgcctcagcacctgggtggcttgccacccacattgggtgtggacaggaaccaagaagctcagggagtaagccgtgcatagtccacatttagggaacagaaaaatcaagagacaccagaagaggaaagcgtgacgtgatcagcgaggtatcaaaaacttgaaaacaaacagtttaaaaaggttaatggtatgtccttaaagccaggaaaacagaagagaaagtgagaaaagaaaaaaaaggaacacaaagaagtttttgtgtactattctcttaaatagagcatagaagaggggaacttactacagaaggaaaagtagttaagggttttttttttttttttttttttttttttaattaatttattttttttttattgatcattcttgggtgtttctcgcagagggggatttggcagggtcataggacaatagtggagggaaggtcagcagataaacaagtgaacaaaggtctctggttttcctaggcagaggtccctgcggccttccgcagtgtttgtgtccctgggtacttgagattagggagtggtgatgactcttaaggagcatgctgccttcaagcatctgtttaacaaagcacatcttgcaccgcccttaatccatttaaccctgagtggacacagcacatgtttcagagagcacagggttggggataaggtcacagatcaacaggatcccaaggcagaagaatttttcttagtacagaacaaaatgaaaagtctcccatgtctacttctatccacagagacccggcaaccatccgatttctcaattttttccccacccttcccgcctttctattccacaaaaccgccattgtcatcatggcccatccccaatgagccgctgggcacacctcccagacggggtcgtggccgggcagaggggctcctcacttcccagtaggggcggccgggcagaagcgcccctcacctcccggatggggcggctggccgggcggggggctgacccccccaccaccctcccggacggggcggctggccaggcagaggggctcctcacttcccagtagggacggccgggcagaggcgcccctcacctcctggatagggcggctggctgggcgggggggctgtcccccccacctccctcccggacggggcggctggccgggcagaggggtcctcacttcccagtaggggcggccgggcagaggcgcccctcacctcccggacggggcgactggccaggcggggggctgatccccccacctccctcccggacggggcggctggccaggcggggggctgaccccccccacctccctcccggacagggcggctggccgacccccccccccccgcctccctcccggacggggcggctggccgggcagaggggctcctcactttccagtaggggcggccgggcagaggcgcccctcacctcccggacggggcgactggccaggcggggggctgatccccccacctccctcccggacggggcggctggccaggcggggggctgaccccccccacctccctcccggacggggcggctggccgggcagggggctgaccccccctcccccctcccggacggggcggctggccaggcggggggctgaccccccccacctccctcccgggcggggcggctggccgggcagaggggctcctcacttcccagtaggggcggccgggcagaggcgcccctcacctcccggatggggcggctggccaggcggggggctgatccccccaactccctcccagacggggcggctggccgggcggggggctgaccccccacctccctcccggactgggcggctggccgggcggggggctgacccccccacctccctcctggacggggcgtctggccgggcagaggggctcctcacttcccagtaggggcggccgggcagaggagcccctcacctcccggacggggcggctggccgggcggggggctgacccccccacctccctcccggacggggcggctggccgacccccccccccgcctccctcccggatggggcggctggccaggcagaggggctcctcacttcccagtaggggcggccgggcagaggagcccctcacctcccggacggggcggctggccgggcggggggctgaccccccccacctccctcccggacggggtggctgctgggcggagacgctcctcacttcccagacggggtggttgccggacggaggggctcctcacttctcagacggggcggttgccaggcagagggtttcctcacttctcagacggagcggccgggcagagacgctccccacctcccagacagggctgcggcccagcagaggcgctcctcacatcccagacagggcggcggggcagaggtgctccccacatctcagacgatgggcggccgggcagagacgctcctcacttcctagatgggatggcggcggggaagaggcgctcctcgcttcccagatgggatggcggccaggcagagacgctcctcactttccagactgggcagccaggcagaggggctcctcacatcccagacgatgggtggccaagcagagacgctcctcacttcccagacggggtgggggccgggcagaggctgcaatctcggctctccgggaggccaaggcaggcggctgggaggtggttgcagcgagccgagatcacgccactgcactccagcctgggcaccattgagcactgagtgaacgagactccatctgcaatcccggcacctcgggaggccgaggctggcggatcactcgcggctaggagctggagaccagcccggccaacacagcgaaaccccgtctccaccaaaaaaaaaaacgaaaaccagtcaggcgtggcggtgcgcgcctgcaatcgcaggcactcggcaggctgaggcaggagaatcaggcagggaggttgcagtgagccgagatggcagcagtaccgtccagccttggctcggcatcagagggagaccgtggagggagagggagagggagagggagagggagggggagggagagggagagggagagggagagggagagggagagggcccctttgtttcttataggagatgctgggtaatccagattaaatttttgaccgggtttttgttttttttgagatggagtctagctgtgtcacccaggctggagtgcagtggtgtgatctcagctcactgcaagctctgcctcctgggttcaagcgattctcctgcctcagcctcccaagtaactgggattaaaagtgcacatcaccacggccagctaatttttgtatttttagtagagaagacgtttcatcatgttggccaggctggtctcgaactcctcacctcaggtgatctgcttgcctcagcctcccaaagtgctgggattgcaggcgtgagccaccatgcccagccttattttttgttttaaagttgaaagagtagatgagaaagaaaggctttattttctgtgtgtgtgtgtgtgtgtgtgtgtgtgtgtgtgtgaatagacaagaccactaatctggatatgctcatcaaaataattcccttgaagtaaaagttgacacagtggaggagggagccacaccgtcctgagactgtggtgcaaaactgaagagccagctgtagggaccagccccacagggtcagtgggtctctccccgtgtgcagcgacgagagagtgtagaaataacgacacaagacaaagagataaaagaaaaggcagctgcgcccgggggaccactaccaccaatgcacggagaccggtagtggccccgaatgtctggctgcgctgttatttattggatacaaggcagaaggggcagggtaaagagtgtgagtcacctccaatgataggtaaggtcacgtgggtcatgtgtccactggacagggggcccttccctgcctggcagccgaggcagagagggagaggagacagagagaaagacagcttacgccattatttctgcatatcagggactattagtactttccctaatttactactgctatctagaaggcagagccaggtgtacaggatggaacatgaaggcggactaggagcgtgaccaccgaagcacagcatcacagggagacggttaggcctccggataactgcgggcgagcctgactgatgtcaggccctccacaagaggtggaggagtagagtcttctctaaactcccccggggaaagggagactcccttccccagtctgctaagtagcgggtgttttcatttgacacttacgctacccctagaccacggtccgcctggcaacgggcatcttcccagacgctggcgtcaccactagaccaaggagccctccggtggccctgtccgggcataacagaaggctcgcactcttgtcttctggtcacacctcactatgtcccctcagctcctatctctgtatggcctggtttttcctaggctatgattatagagcgaggattattataatattggaataaaaagtaattgctacaaactaatgattaatgatattcatatataatcatatctaagatctatatctggtataactattcttgttttatattttattatactggaacagctcgtgttctctgtctcttgccttggcacctgggtggcatgccgcccacagccagcaacagcccggagcagggacagaccattcccagtacctcctgagttgagattgcaggccttaagacaggtgggtgggcccgttggagagctcttccctttactgtttgagacaggaaaaaattaaactgttcatactattgtcacactcaacccagaatacttcacttgtagtcaccaaaatgtgtgcagtttttcccacaatgaccagttctgcagtgcactcccagtggtgggtcctacaatttcactccactctgacactgtcagttctcccaggtgaagatctcagtgtgctacatgctactagtagctgttggctacactctcaccagataaataccgtgattctcttaaccccttccttggattcaattaacttgctaaaaccattcatctgtatgcttcgtagtatcctttataacaattaggtaggccgggtgcggtagctcatgcctgtaatcccggcactttgggaggccaaggtgggtggattacctgagatcaggagttcaagaccagcctggccaacatggtgaacccccttctctactaaaaacacaaaaattatctgggtgtggtggcggacgcctgtaatcccagctacttgggaggctgaggcaggagaattgcttgagcccaggaagcggaggttgcagtgagccaagatcgtgccattgcactccagcctgggtgacagagcaagactccgtctcaaaaacagaccggcaaacaaaaaacaattgggtaaaccaaggaaaatgtttccctgagttctatgagctgctctggcaaattaatagcacctcaggaagggatgaggagaatcccaaatttatactcaatggatccgaagctccgaatctgggacttggggctggtatctgaagagggaaccctcaactagtgggatctaatgctaactctgggtagacagtgtccgaattgaattaaattattggacagtcaggtagtgtttgttcaagaactgcgtgttggtgaggagaaatccccaccccacacgttttggtgatgagaggcgatgcattctttgttgagcgttcattacttgattatgagagtgggaaaaacactttggtttttcctcctcactcatacacttgcctacacattaccccatcctaggaaaaggaaagagggtgacccataactgaatgagtcaagtcactgctctcttagaacagagattgcaaatagaagctaacctctgatgccaggaattataaaatgcacatgtcttatagacaaaacttttgtgattctcaccagcatctccataacagaaacaaaatatatacatataaaatttgttagattattaggggctgggcacagtggctcatgcctgtaatcccagcattttgggacgctgaggtgggtagatcacctgaggtcaggagttcgagaccagcctggtcaacatagtgaaaccccgtctctactaaaaatacaaaagttagccaggtgtggtggtgcatgcctgtaatcccagctactcgggaggctgaggcaagagaatcgcttgaacccaggaggcggagttacagtgagtcgagatcgtgccattgcacgccagtctgggaaatagagtgagattctgtcttaagaaaaaaaaaatttgttagattatggatacagaaatcaatatatcacgatgtaattatccatatccaatgaaaccaccatgcatctgggccatagtccccctctttcttccttcctgtgtgtttccctccctcattctgtacatctctctcattctcttcttctctctccttgtttcttttctgtgtttcagcctgggtctctgctcctcattttgagcccctctcttctcctgctgtttctccttccctctatccttctcttccacttgttctgttccattcttgcaacttgtttcacctcttattcctctttcacccgtcttttggttgtccccaatctccatctatttctgcctctttcttcccttatctctgctctccctgttaaatcccctcttccctgtttcacttccttgtccccactctttggcacccccagatcccaggtctccccctgctgtggttctccctctgctctccttgtcaccagctgccccttcttgctgtcccagcaccacgctgctctgtctatcctggctccaaataccccctcctctccctaactctccgtctgaggagctgcccctctccctaccttgctgtccttcatctctctagacagcgagcttttctctacatttctccagttgtttctccatcctgttactttctcagcgacttctttcacccttactgtctctttgtaaatcctgacccatcctctactttgccatgtttactggtttccctcattctttcctctgtctccgtttttctacttttctctcagcccccctctctgtctcctgatccccttggcccacacattcacagggagggtttggagtaagacacctggatcctggaggagcacattttccagcgggtggagctgggcaggcaagaacaccgggtatcacaggacaaggcccgggcacctccccaacgcgggctcaggggaaacggtgactgcgaaggggaggcctagggagcagcagggcccggcacgaggaggagggaggtggggggcgacggcgccttaggagaggggtggggtatgcaggatcccaggaccaggcagaggcgcggcctccccgggactggggctgcggcgctaacgctccagtagctgactagggcgaggttaggggacggtaaaatcctgcacccacttcgcagatgaggacttcacagggcgcaggtcagtaaagggttttaagcaggaaacggcgcaggaaaggaggtgtctgcatggtctgaaggccgaaagaccgcgggcaggaccagcctgtgtgattttaacccaaagcgatgcgacccccagagtctcgcggcaaagtctgaatttacatggaatggagggagccgtgcggggactttaagggctatacgaacccccggacatcgggtacggaggagcaggggactccgaaacgcaggtttaatctagatagagggaaactcacgcggcgactaacagccttcactccaagagatctgcttccgggtttgcaagaaactgcccgcgcagtaggcaaaggggcgggttgcggtggggaaaggccaggcgttgggagggactgagagcatagggtgggcggggccggggcggggcctgaaccctggaggcggaggttgcaatgagccgatatcgcgccattgcactccagcctgggtgacagagtgagacttcgtctctcccaaaaaaaaaaaaaaacaaaacttaggctatctaaaagtttaaccaatggccagtaatataagcaatcatgcatatgtaatgaaggcgccataacaacccaaaaggagaggattcagcggagcttctggataggtgaacactgggaggctcctgcagcgtggtgcacccagggagggcaccaaggctcaacgccccttctcccatgcctcacctcactgatcccttccatctggctgttcttctgtcaactttgtaatatcctttataatacgtaaatctatgtaaagtgtttccctgtattttgtgagccactctagcaaattcgttgaacctgaggagggggtcaagggactcctggatttatatctgatctgtaagcacaagtcacaacctctgcttgagactggcattgaaatgtgtgcactattgtgggactgagccctcaacgtgtgggatctgatgccatgtcccggcaaaatggaacggaatgagagaacacgcacctggtgtctgtggcaggattgcttgcttggtgtgtgtgggaaaacccagtacctctgggctaactgtagcattctgtgttgtgagagaacagtagaagaaactgaatcagtgtttcctatattcttaaatacgaatatgtgaggtttgttgttgtttttttttttttttttttttttttagacaagagtcttgctcttgtcgcccaggctggaatgcaatggcatgatctcggctcactgagccaccgccccagcgtgaaggcatttttgagcaagttatgtctccctaattctgttttattgtacttttccctaagtagttataatagcctctaaatctgtgtggagttttcagttttgtggacaatacaataaatagacaaataaaaacccaaacacaagctgatctctatagaagtgttagatattattttcaacacactaagtgatactccgtatctagataagctaaagcacgaatgatgtcttctgaggtgacaaggtccacagtggctttacagaaacactggccagaagtaaaaactgtgatgataatggcaatagcaatgactgacttttctgaacactatgtgcaaggcattattcggaatactttacctgtattaactcaaataacaacataatagcccatgagaaaaagatcttttcctatcttactaggaaacaactgtgtcggccgggcgctgtggctcacgcctgtaatcccagcactttgggaggccgagctgggcggatcacgaggtcaggaccggatcacgagccgggcggatcacgatggtcaccaggagaccatcctggctaacacggtgaaaccccgtctctaatgataatacaaaaaaattagccgggcgtggtggcgggcgcctgtagtcccagctactctactcgggaggctgaggcaggagaatggcgtgaacccgggaggcggagcttgcagtgagccgagatggcgcccctgcactccagcctgggcgagagcaagactccgtctcaaaaaaaagaaaaagaaagaaactgtcacagatacgctaagaaactggcctaaggtccaagagctagaaatgacagagcaagccccgaacccaggcatctaagaattacagttaggctgagagcagtggctcacacctgtaatcccagcactttgagagcctgaggcaggaggggtgcttgagcccaggagttcaagaccagcctgggcaatatagtgaaaccccatctcaacaaaataaagacaaaacaaaaacaaaaaacccctcaacaattacaattaaacctaaagaatcagttaagtaacagaagtaccatcaaaagtgacaggatgccaggtcagggaaaccattgagaacaaaggcaagcaacataaacgagagtctgcagtaacgcaggcagacactaggtggagaaccagaccacagcttaccatgaaaacacagggactgcagaattgcagactgtcaacaggagctctcctgaagaaaaactggcaaaccttctcaggtaactacaagcaaaagcccagagacgacacattcccagaaaaggcttcagaggtttccagaatctctagtcaggctgaatagagaaggtcctccctgaaggaagccagaaataaaaaagtaggactggttgattagtgaaatgctgaggtgccaagataacaagacattcaaggagaaaaggaaacatgatccacacaaaggaacaaatgaaaccaccacaaactgacactaaagaaatgaagatgtgtgaattatcagacaaagaattgaaaataagagtcacaagatggtcaatgaattaagaggagagcacacatagacaaccacaggaaatcaggaaaacaagatatgagcaaaatgagactatcaatagagagacagaagctataaaggaaaaacagagaaattttagagctgaaaaatgtaatcagaaacgcagaacacagagccttggtgctcaatgctgcacacagattacaacgccctgggccaccgtagttattattgagggtagatcccaacctgaccatgggaataggaatcttgggcaaaagaaagttgaaatggttaaacttatacgttaatacgttaaaatacgttaaaaggtatttttgccagcgaatgggacagaagttgaaatggttcacgttgaaatggttattactgccagcaggtaggacagaagagctgctagtgagactgaagcaactctgggtggggatctggcatctctgggggtgtcggtttggggtagattgaatccaggaaagtttctgcaatttgaattaatttaagcaacttaactaaaaagccctgaaaatgtctgtgaagggtatgcaaactagaatgtgaaatgcaaaactctgcctgggcagaatgtgtaagtaatttcaagtcacctctcaacagaacttaatgcaatcccctccacattctacacccattcaccatggagggagagagtcagccctgtgcacagttgcagagattttcatatggtaaatacctggggtgtggagcgaggagggctaataccggtgatattaactcttgctttagaaaaagcagtaactttttaaaaatagttgagcaacttaagtttgcaacttaggaaaacatcttactttccaacagagatggcccacataactctaagggtttaccttaaaattgagacattaacttaaaataagcagaaagcaaaactgctccgcaggacacgaaatagacttgtgttcccaaacccagaaaatagggacgctctgggtaccaggtggctggaaacgcaggctcccacccgccttccttaggtccctcccggccccgccccctgcctgtccaggccccgccccacccttcgcgttttctccccagcccactccctgtgccggtcacgccccgcctaggccccgcccctaggccacctcagtcccctccggccccgccccctgccggtctctccctggccaggccccgccccttccccgcccccagaccgcccagtctccgctgcgagcggttttctgtagacccggaagcggatcgcggggagtgaaggctgcgccgccgagcctgagtttcgctctctctagattaaatctgcgcttcgcagtcccccttcttccatcccccgggtctggaggggtccctacagatcttaaaatgaccacaccgcgccctccaccccaggtaaattctgacgttgctgtgagaatgcggagatcgctttccctttgggttaaagtcgctctaagcctacttcctgaatctggtctttctgctttgcgctaggtaaacatggcctttcgtgtcttttgctgcctaaaatcctttaccgatttttcttcccgccacgcgggagggcacttttttttttaagacggagtctcgctgtgtcgcccaggctggagcgcagtggcgcgatctcggctcactgcaagctctgcttcccgggttcacgccattttcctgcctcagccttccaagtagctgggactacaggcgcccgccaccacgcccagctaattttgttgtattttttttagtagagacggggtttcacccgtgtttgccaggatggtctccatctcctgacctcgtgatccgcccgcctcggcctcccaaagtgctgagattacaggcgtgagccaccgcgcccggccgggagagcactttttagagccctcacctgcaaggtggattcaggtctatccggttctccaagacctgcccttgtcggcccctggtgcgcagcgctgcagcctcagtccggaggggccgcgtccttacttggttctgggattctgcagaccccacccctgtcctaaggtgccacctttgtctttctcacccgaaatctttctcaggaagggccttcagctcccaagcccctctaggcagtcacctcccatggtgggaaggtgagctgggcttgtcctgtgacactcatggtggaggaggtgacctaggcctgttcggtgacacccagtatgcttttttttttttttttttttgagaatgagtctccccctctgttacccaggctggagtgcagtggcgcaacctcagctcactgcaacctccacctcccgggttcaagcgattttcctgcctcagcctccggagtagctcggattacaggcatgtgccaccacgcccggctaatttttgtattttcagtagagtcggggccaccatgttggccaggctggtctccaacccctgacctcaggttatccgcccgcctgggcctcccaaagggctgggattacaggcatgagccaccgcgcccagccaacatataacacttctgacagcaaatgtgtgggagtttttttcccacacactaggcaattctccagtatacaccagttgcgtgtcctataattcaattcaattctgacactgtgcgcctggagttagagtcagatccaacaggttaaggtcttagtcccacaagaccacccccctgcccccccgccgccacttcagacgtcagtcaaaagtaataggttgtcacctgtccttaaaactgacctatatattggggctcccatgactccctctttgggtttgattaacttgtgaggacagctcacaggactgctggaagcacttacttatgtttactgattttttgtgcagtcatttctcacttcatgttttctacaggttcttggaaaccgggtcatgaatgaaatgatatacagcaggtcctcgaataacgttgttttgttcaatgtcatcattatcattattattattattattattttgagatggagtctagctctgtcaccaggctggagggcagtggtgctgtctccgctcgttgcaacctccacttcccaggttcaagtgattctcctgcctcggcctccttagtagctggcattacaggcatgtgctgccatgcccagctaatttttgtatttgtagtagagacagggtttcaccatgttggccaggatggtctcgatctcctgacctcttgatctgcccaccttggcctcccaaagtgctgagattacagtgtgagccaccgcacttggccattcgatgtcattttttatgtagatgaggaaaaaggttgccatttcacttaaagttccggtttccaagaatctattgataacatcaagtgaggatttggtgtattaatgaaggatatcataaaagatacccatgagcagccagatgaagagatatgtatggtgaggtctgagaatgttctaagcacaggagcttctgtccttgtggatttgggtgcacccaccctcctggcattcagatgtgtttatcaaccagaaagctctccgaagtctatagatcaggaacttttatcgaggcttcatcctgtaggcatgagagattattaactcagtcttcagcatgctccactctttgggaaataagtgatggagctgaaatctccaagcttctaatcatggcttactctttctggcaactggctctatccaggagcccaagacttgcctcattagaacaaaaacactcctatcacgtaggaaattccaagggatttaggagctttgtgcaaggacccggggtcaaagaccaaatatgagaaccaaagattctcctaacacccctttctgtgaggggtttaggatctatatcccaggaaccaggggcagagaccaaaaatatatttcttgttatttcacactccctctgagtggagctcaatcctggtttgacttgagagtactgagtcgttttgcaaataaaactcttgtgcctctttacctgagttttccattcatgtaatggggttggagtccagccttgacagtagtgatgttaccccagctgattctaatctgtccagcattgatactgaggctctgtgtcctccatttctttttttaaaattttttagatggagtctcactctgtcacccagcctggagtgcaatggggcaatctcggctcgctgcaacctctgcctcctgggttcaagcgattctcctgcctcagcctccctagtagctgggactacaggcacgtaccaccatacccggctaatttttgtatttttagtagaaacggggtttcaccatgttggccaggctggtatcgaactcctgacttcaggtaatccgcctatctcggcctcccaaagtgctgggattacagactgtttcctccatttctgaggcctcagctcagcctgggatccatagggatgtgagggcggctgtgctctgcatgaggtttgctcaaggccaggtgtgcaccctgaaggggagctcagtccagcccagctccccaccgctgcagcgtgcgtgtgggcctctctaggaggagagtgggttctgaagaaaggggttacagactcacctgttggtcttcctacaagtttctttttcctacaagtttcttcttcctacaagtttctttttcctcctggtgcagtcggtggcagaggactgtctttgcacgggtgtcttccctgtgtgtgtggtcgtggcacaggaagggggtgtgttaattctaggcattaaataacttctttttcacattccagattaacctttaaagactcatgtggcctgaggaagaagtccagaagagaagaaagaggagacagggatggctctttctcaagtaaagtgatattcttggtggattgttctgtttccccctttttttttttttttggagacagagtcttgcactatcgcctgggctgaagtgcagtggtgtgatcttggctcactgcaacctccacctcctgggttcaagcgagtctcctacctcagcttcccaagtagctgcaattacaggtgcccgccaccatgcccagctaattttttgtatttttagtagagacagggtttcactatgttggccaagctggtctccaactcctgacctcatgattcacccgcctcggcctcccaaactgctgggattacaggcgagagccaccgtgcccagcttgttctgtttctctttcctttctgaaatttcattctttggagttgcaaatcttctttgagtctgaagcatcctgcctgacacgtttgttcgcactcacccgtgccttccctcagtccctctcatttcacttagattccattgcctgtgacccactgatgtgaacttgggacgaggccccactgggcatggtcctgggaagggctcacacccatacatggatggacacggcatgtgagccccgtagtgttaggactgttaggcaagagggattgtttagcggccacatctggatgcactgtgaggtctctgtggaccaggagtagagaagctgcacatggaagtcatgtactaatgcgcacaagtacctggtaattccagaaaaggaggctgatgaggggaattctggcacattgtttgtctgatttaagaatacattcgaagataaatacatgaatctgtatgtttttggctccagaattgttatgatttggaatggaatggaaagttcagaaacaccttagtgaggggagggtgttttattctagcactgatttgttctcttttttgagatggagtttcgctcttgttgcctgggttagagtgcgatggtgtgatctttgctcactgtaacctccgcctcccaggttcaagcgattatcctgcctcagcctcccgagtagctgggattacaggcatgtgtcaccatgcccggctaattttgtatttttaggagagacggggtttctccatgttggtcaggctggtctcaaactcccaaactcaggtgatccatccgcctcgtccttccaaagtgctgggattaccggcgtgagccaccacgcctggctccaccaattttaaaatatgaaatcaatctaaatctctttttttttttttgagacaaagtctcactcttgtcccctaggctggagtgcgatggtgcgatgttggctcactgcaacttccgtctcctgggttcaagtgattctcctgcctgggccccctgagtagctgggattacaggtgcttgccaccacaccgggctaatttttgtatttttagtagagatggggttttaccatgttggccaggctggtcttgaactcctgacctgaggtgatccacctgccttggcctcccaaagtgctgggattacaggtgtgagccaccgcacccggccagaaaacaatctaaatctctaacagaaggagattctttacgtcattttcagcacatccttctcttggaggttgcttttcagcctcttgattctttcttttgatgcagagatgtttgtaagtttgatgtagtcccatttgtatatttttgcttttcttgcctgtgtctttggtgtcatatcttagaaatgactgcaaaattcagtttcgcaaaccttttctcctacactttcttctaggagttttatcatgttaggtcatatgttgaggcttttaattcatttttctttttttttgttgtttgtttttgttttttgttttttttgttacccaggctggagtacagtggtgcgatcttggctcactgcagcctctgcctcccgggttcaagtgattttcctgcctcagcctcccgagtagctgggactacaggtgcccgccatttcaccacgttgcccaggctggtctcgaactcttgacctcaggtgatcctcccgcctcagcctcccaaagtgctgggattacaggcgtgagccactgcgcccagcctaaatatttaaatttaaatggatagaattttatttgtagtttgactataactatttcatagggattggagttaaagttttaaatatttttttcatgtttttaccattcttttattggcattatataacataatgttgacaaactaagttaaatacaacttatacactttactgtccccaagatgctgaaatgcacatgaggaaaaatgataatgaaaaagtcataaaaagtatgtcattgagaggcatgttttctctttgttaatttacattcgtgtatatatgtgtgcatgaatgtatggatgaactatcctatggcgtttatagacgacacatcaccatttcataaatcagttccgtatttttatttttttattttattttatttatttatttttttgagacggagtcttactttgtttcccaggctggagtgcagtggtgcgatctcggctcactgcaacctctacctcctggttcaagtgattctcctgcctcagcctcccgagtacctgagattacaggtgtgcaccaccacgcccagctaattttcgtatttttagtagagacggggtttcaccatgttggccagtatgatatcaatctcttgacctcatgatcaccagccttggcctcccaacgtgctgggattacagacgtgagccaccacgcccggccacactttttagattctgacctttctttctttaaagacaccatggacattgtcatctctgaagacaacacacttcttccagctcctccagatactgaatatcactttgtgtgtcaaacataatatctagcacttctatagagatagctgtgtgttgactatttatttctacgtttcttccattgtctacagaaagagaaatccacacttatttagaagatatcataagctcttacagaagagtataataaaatgcaattagggagacatacctaatgttcttcctaacgtccctaaatgccccaaaataccttagcatggatctgccagaactctcccttcagtaaatcaatacaattctctctttttctcattttatgtaaagatgataactctcccccatgtgcttggtaaaatgtgtttttcagacacggtttgcctgaaaatacctttccatggatttcccagaacgttcatttaaactaaattgacttatacctctctttttgtcattttgtgtgaagataatagctctccccatgacttcttggtgaaatgtgttttttcatatcagggaaggttgacattcagggacgtggccatcgaattctctcaggaggagtggaaatgcctggaccctgctcagagggctttgtacagggacgtgatgttggagaactacaggaacctggtctccctgggtgaggataatgcccctccagaagctgggatctgctctgctgtatctctgcatgttccctgtgtgcctcttgggagcccctgcattgctcaattaagactgaagctatgttaattctcagatgaaaagcttaatagtgcagcatctggacttaattatcccattttcaaatgatctacctccttcaagatatatcattggtggttccagagcttaagtagaaataaaccctatggtagactttaaaaatatctactttgggccagcgtggtggctcacgcctgtaatcccagcactttgggaggccaaggcgggtgggtcacctgaggtcaggagtttgagactagcctggccaacatggtgaaaccccatctctactaaaaatacaaaaaattagccaggcgtggtgccgagcgcttgtaatcccagctacttgggaggccaaggcaggagaatcacttgaacccgggaggcggaggttgcagtaaaccgagatcgcgccactgcactccagcctgggcagcaagagcgaaactccatctcaaaaaaaaaaaaaaaagaaaaagaaaaagtaaaaaaatccactttgctcttttctgcccctttgcttgtgattcagtacttcctagaggacagttcgatgttcgtattttaccatgttccctaaacattcagaaggaggcattcagtgggtgaatttgtgaaatatttttctagatccatttgtaatgtcctctttcctcctctaaacaaagggctgggattctgtaaaagccacagcacattacatgcctttctttttctaagcaggaatctctctttctgaaatgagtattacctccatgttggggcaagggaaagagccctggactgtggagagtgaagtgaaaataacaaaaacatcaagtggttgggaatgcatcaaaggtgtgaacacaggtaagagctcaaatggacagagaggaagctgcaccattagtattcaggtaactccttccgagttgaagagttctgtggaacaaaaagggtttaaatcctgtgagctctcaatggaaacctttctttgccctcatttatccctctgctcttctgacgtgtagtagtttatcctttcacactcccatggcgctacagctccaacagtgacaaaggcaaagtctttatcatgatggacaacaccctgtcatgtggcttctgtgacctctttggtttcttcactctgaggggcacagggagggttgtgtccaagaggtctcctgtgatctctcctgtacctgactgcgtctgatgctcagttctctgtctatacagatcagagctgaggcctccatggacctgcccccttgacctattcaggttttgccccatttcctgtacttgggagacctaatcaggtgacgggaaaacattggcagctcctcctttgcatctggggctccggaaacctcatggtgctgtctccagccctgtctgtctgtcaaagtctttcagcctcagtcatttcttctgttctgcttttgccacagattgcagtgtgcgccacaggggagtacacggggttttctgagattgtttactcaggtctggaatggcactagacagagaggtcctctttttttttttcttcgagacagagtctggctctcttgcccaggctgtgatgcagtggtgagatctcaactcactggaacctctgcctcccaggttcaagtaattctcttccctcagcctcctgagtagctggaactacaggcacatgtcaccacacctggctaatttttgtatttttttaaaaattattatactttaagttttggcatacatgtgcagaacgtgcaggtttgttacataggtatacgtgtgccatggaggtttgctgcacccatcaacccgtcatctatattaggtatttctcctaatgctatccctcccctacctccccatcccctccacaggccctggtatgtgatgttccccctccctgtgtccatgtgttctcattgttcaactcccacttatgagtgagaacatgcagtgtttggttttctgttgtgttagtttgctgagaatgatggtttccagcttcatccatgtccctgcaaaggacatggacttatccttctttatggctgcatagtattccatggtgtatatgtgccatattttcattatccagaaactaatatttctggataatgggcatttgggttggttccaagtctttgctgttgtgaatagtgccacaataaacatacgtgtgcatgtgtctttgtagtagaatgatttataatcctttgggtatatacccagtaatgggattgctgggtcaaatggtatttctagttctacatccttgaggaattgccacactgtcttccacaatggttaaactaatttacactcccaccaacagtgtaaaagcattcctatttctccacatcctctccagcatctgttgtttcctgacattttaatgatcagcattctaactggcatgagatgctttctcattgtggttttgatttgtgtttctctaatgaccagtgatgatgagctttttttcatatgtttcttggccacataaatgtcttcttttgagaagtgtctgttcatatccttcgcatagatgttcatgagggatattggcctgaaattttctttttttgttgtgtgtctgccaggttttggtatcaggatgatgctggcctcattaaaatgaattagggaggattccctctttttctgtttggaatagtttcagaaggaatggtaccagctcctctttgtacctctggtagaattcggctgtgaatctgtctggtcctggactttttttggttggtaggctattaattaccgcctcaatttcagaacttgttattggtctattcagggattcgacttcttcctggtttagtcttgggagggtgtatgtatccaggaatttatccatttcttctggattttctagtttatttgtgtagaggtgtttatagtattctctgatggtagtttgtatttctgtgggattggtggtgatatcccctttataatttttattgcatctatttgattcttctctcttttcttctgtattagtctggctagtggtctatctattttgttgatcttttcagaaaaccagcttctggattcgtctattttttgatggatttttcgtgcctctatctccttcacttctgcgctgatcttagttacttcttgtcttctgctagcttttgaatttatttgctcttgcttctctagttcttttaattgtgatgttagggtgttgattttagatctttcacgctttctcttgtgggcagttagtgctataaatttccctctacacattgcttttaatgtgtcccagagattctggtatgttgtgtctttgttctcattggtttcaaagactgccttcatttcattatttacccagtagtcattcaggagaaggttgttcagtttccatgtagttgtgcagttttgaatgagtttcttaatcctgagttctaatttgattgcactgtggtctgagagacggtttgttatgatttccattcttttgcatttgctgagaagtgttttacttccaattatgtggtcaattttagaataagtgcgatgtggtgctgagaagaatgtatattctgttgatttggggtggagagttctgtagatgtctattaggcctgcttggtccagagttgagttcaagtcctggatatccttgttagttttctgtctcattgatctgtttaatattgacagtggggtgttaaagtctcccactattattgtgtgggagtctaagtctctttgtaggtctccaagaacttgctttatgaatgtgggtgctcctgtattgggtgcatatatatttagtatagttagctcttctggttgcattgatcctttaccatcatgtaatgcccctctttgtctcttttgatctttgttggtttaaagtctgttctatcagagactaggattgcaacccctgctttttttgctttccatttgcttggtagatattcctccatccctttattttgagtatatgtgtgtctttgcatgtgagatgggtctcctgaatacagcacaccgatgggtcttgactctttatccaatttgccagtctgtgtcttttaattggggcatttagcccatttacatttaaggttaatattgttacgtgtgaatttgatcctgtcattatgatgctagctggttattttgctcattagttgatgcagtttcttcatagtgtcgatggtctttacaatatggtatgtttttgcagtggctggtaccagttgttcctttccatgtttagtgcttccttccttataaggcaggcctggtggtgacaaaatatctcagcattagcttgtctgtaaaggatttgatttctccttcacttatgaagcttagtttggctggatatgaaactctgggctgaaaattcttttctttaagaatgttgaatattggcccccaccctcttctggcttgtagagtttctgccaagagatctgctgttagtcttagggcttccctttgtgggtaacctgacctttctctctggctgccattaacattttttccttcatttcaaccttggtgaatctgacgattatgtatcttggggttgctctccttgaggagtatctttgtggtgttgtctgtatttcctgaatttgaatgttggcctgtcttgctaggttggataagttctcctataataatatcctgaagggtattttccaacttggttccattctccccatcactttcaggtacaccaatcaaatgtagatttggtcttttcacacagtcccatatatcttggaggctttgttcatttcttttcactctttcttctctaatcttgtcttctcactttatttcattaagttgatcttcaatctctgatatcctttctgctgcttgatcaattcagttattgatacttatgtatgcctcatggagttctcatgctgcgtttttcagctccatcaggtcatttatgttcttctctaaagtggttattctagttagcaattcatttaaccttttttcaaggttcttttcttccttgcattgggttagaacatgctcctttagctcagaggagtttgttattacccaccttctgaggcctacttctgtcaattcgtcaaactcattctcctagttttgttcccttgctggtgaggagttgtgattctttggaacagaagaggcattctggttctttttgtgctggtttctccccatctttgtggatttatctacctttggtctttgatattggtgaccttcagatggggtctctgagtggatgtccttttagttgatgttgatactattcctgtttgttagttttccttctaacagtcaggcccctctgctccacgtctgctggagtttgctgggggtctactccagaccctgtttgcctgggtatcaccagcagagactgcagaacagcaaagattgctgcctgttccttcctctggaagcttcatcccagaggggcacccgccaggtgccagccagagctctcctgtacgaggtgtctgtcggccccctactgggaggtatctctcagtgaggatacatggggggccaaagacccacttgaggaggcagtctgtcctttatcagagctcaaacgccgtgctgggagatccgctgctgtcttcagagctatcaggcagggacggttaagtctgctgaagctgctcccacagccgcctcttcccccaggtgctctgtcccagggagatgggggttttatctataagtccctgattggggctgctgcctttttttcagagatgcccagcctagagaggaggaatctagagaggcagtctggccgcagtggccttgctgagctgtggtgggctctgcccagttcagactttccggcagctttgtttacattgtgagggtaaaaccgcctactcaagcctcagcaatggcggatgcccctccccccaccaagctcaagtgtcccaggtcgacctcagactgctgtgctggcagtgagaatttcaagtccatggatcttagcttggtgggctccgtgggggtgggaccccccaagccagaccacttggctccctggcttcagccccctttccaggggagtgaacagttccgtcttacgggtgttccaggtgccacgggggtatgaaaaaaaaactcctgcagctagctcggtgtctgcctaaacgtccacccagttttgtgcttgaaacccagggccctggtggcgtaggcactggagggaatctcctggtctgccggttgtgaagactgtgggaaaagcacagtatctgggccagagtgcaccgttcctcatggcacagtccctcacagcttcccttggctagggagggaaatcccccaaccccttgcacttccctggtgaggtgacgccccaccctgctttctcttgcactctgtaggctgcacccactatccaaccaattccagtgagatgaagtgggtacctcagttggaaatgcagaaatcacctgccttctgtgtcgatctcgctgggagccgcaggccagagctgttcctatttggccatcttgccagcaaatccctaatttttgcatttttaatggagatgaggtttcaccatgttggccacctggtctggaactcctaacctcaggtgatctgcctgtcttggcctcccaaagtgctgggattacaggcgtgagccactgcacccggccgatatatttttcaatatgaactactgatttgccaactgtagttaatagaaaacctgttttttaaatatcttgtagatgtctctcctacacatatgatcaaggaattaccaccaaaagagaacaatagcacaggaaaagtattccaagcagtgatgttggaaagacatgaaatccatgacatccaagatttttacttcagagaaatgcagcaaaatattcatgactttgagtgtcagtgtcacaatgatgagagaaattacagagaaatacctgcaattaaaattaaaaacatcactggaagaagagatcaaggtgatggaaggaatgcaggaaataagccagttgaaaatcagcttgaactaagcttttggttgcatctggctgaactgcagggatttcaaattgaaaggaaaatttatgaatgtaatcaaattgagaagtctgtcacccgtgggtcctcagtttcattacttcaaacaaatcttccttgtgtcaacaccagcatttctaatatatacaggaatgattttatgcatccttcattactcacacaagaccagaaagcatacattagggaaaaaccttacaaatgtagtgattgtggcaaggcctttaatcagaggtccaaccttactacacatcagagaatccatactggacagaaaccacataaatgtgacatatgtggcaaaggtttcaggcgaattgcaaacctagcaagtcatcatagaattcatactggagagaaaccttacagatgtaatgagtgtggcaagaccttcaatcagacgttcaaccttactacacatcagagaatccatactggacagaaaccatataaatgtgatagatgtggcaaaggtttcaggcaaattggaaacctagcaagtcatcatagaattcatactggagagaaaccttacagatgtaacgagtgtggcaagacctttaacaggatgttccaccttactagacatcagagaatccatactggacagaaaccatataaatgtgatatatgtggcaaaggtttcaggcaaattgcaaacctagcaagtcatcatagaattcatactggagagaaaccttacaaatgtagtgattgtggcaagacctttaattacaggtcccaccttacaagacatcagagaatccatactggacagaaaccgtataaatgtgatacatgtggcaaagatttcagtcaaaattcataccttgaaaatcatcagagaattcacactagagagaaatcttacagatgtaatgagtgtggcaagacctttaataagatgaccaaccttactacacatcagagaatccatactggacagaaaacatataaatgtgatatatgtggcaaaggtttcaggcaaattggaaacctagcaagtcatcatagaattcatactggagagaaaccttacagatgtaatgagtgtggcaagaccttcaataggatgttccaccttactagacatcagagaatccatactggacagaaaccatataaatgtgatatatgtggcaaaagtttcagtcaaaattcataccttgaaaatcatcagagaattcacactggagagaaaacttacaagttgtaattagtgtggcaaagcctttagcgtgcgctcaaacctaactaaacatcaggtcatccataatggagagagaccttataaatgtaatgagtgggacaaggcttttttttcagagttcaaaattgtaaaacatcacaggattcattctggagagaaacaaaacaaaagtaatgaatgtagtaaggcatttattcaaaattcaagtctggtggaccatcagagaactcacactggagagaaaccttacaagtgtaatgagtgtggtaaaacctttattgggcattcaagcctaactaaccatcaggtaattcatactggagagaaaccttacaaatgtaatgagtgtggaaaggcttatgtgaagtggtcccaccttagacatcatgagagtattcaaactggagagaagccatacaaatgtaccaaatgcagcaaggcctttagacaatgggcggacatcaggattcaccaaaaaatctatgctggagagaaacctcacaagtatgatgagtgtggaaaaacctttacccaggcctctcacctcactatacatcagattatccatactggagagaaaccatatgaatatgacatatatggcaaagtcttcagtcaaaattcacatttcaaaagttatcataggatttgtactgaagagaagccttacaaatgtgtgtggcaaggtcctcagtcaaaattcacaccttgtaaatcatcagagaattcatactggagagaaatcctacagatgtcatgaatgtggcaaagcctttactcaaggctcacgcttcattaatcatcagatagttcatactggagagaactttccaaatgtactgaatgtagcaaggcttttaagaatggccctaaactcaggactcaccaaatagatcatacttgtaaatgcaatgaatgtagcagtgttttaaagtagtgcttgctactcattagataagagtatctaatatatcttggggcaaaggcacacaaatgcaatgtctgtgacaaggattttatctgaggatcaaaagttggggaacagaataattcgtactggggagaaaccttagaaatccaatgagcatgggaaaaactttaccatgagttcaagtactacaagacatcagagagttcatattgaagagaaaccatgtaaatataaggtatgtggcagaggctcttttcaggtttcacagtgcactggacatcagagtatacatcttttgccgggcgcggtggctcacacctgtaatcccagcactttcgggaggctgaggtgggtggatcacctgaggtcaggagtttgaaaccaccctggccaacatggcgaaacgctgtctctattaaaaatacaaaaattagctgggcgtggtggtaggtgcctgtaatcccagctactcaggaggctgaggcacgagaattgcttgaacctgggagatggaggttgcagtgagctgagatcatgccactgcacgccagcctgggcgacagaggaagactccgtctcaaaaaacaaaacaaaacaaaaaaacagagtatacatcttttagagaaatcaaagtaacatgcatgctaaagcttttttttttttttttttgagatggagtcttgcactgtcgcccaggttggagtgcattggcccgatcttggctcaccacaacctccgcctcctggattccagcaattctgcctcagcctcccaagtagctgggactacaggcgcgtgccaccacacccggttaattttttgtattttttagtagatacggggtttcaccatatcggccaggctggtctcgaactcctgacctcgtgatctgcctgcctcagcctcccaaagtgctgggattacaggcttgagctcctgcgcccagcccatgctaagtcttttacccagtggtcaaaactggcacaacacaggatttatactggagagcaacctcacaaatgtaatgaaagtggtaaggctttttatcaaatgtccttgtctttggggtcatgagaaaattcatacagaatctattaaaaatgtactaaacatggaaagacctttaagcaacagtgatgtgatgaaggtggtagttttttaaatgaactcccataagagtctacacaccatagaactcataccaggaatcacaaagtctctaaatttccaaagttaactggaaatattacaaactgcagaataattccaggccaaaatatgttaaattcataacatgatgtatatcaaaggaaaaaaggacatgtggaaatgacacattatcttcagtgtataaaatattcatttatgtgaagtttcttggaaaggctacactactattactggtttccgtctgatgtttgagatctgttgattttatgcttttcttacaggcctttcattatgatctttgggaaggaatcaataaaatgatagggcctacttcattaggtgtggttcattcctattcatgctccctggaagaacaagaatgctgaattttgaaatttaatattgtatgaattagcatcagggagaggtggagaaaaatacaaaactaaaagtcatgcttattgtgttcagtgtgcccttctccagagggccactggcttataggaaaggattgctgctctaccagttgaccaggagatggcacgccaggacattaagacactggagttttgtttcgttttttttttttttttgagatggagtctcgctctcttgacaggcaggagtacagtggtgcgatctcggctcactgcaaactccgcctcccgggttcaagtgattctcctgcctcagcctcccgagtagctgggactacaggcgtgtgccaccacccccagctaacttttgtatttttagtagagacagggtttcaccatgttagccaggatggtctcaatctcttgacctcatgatccgcccgcctccgccttccaaagtgctgggattacaggcgtgagccagtgtgcccggccgacactgggctttttatgagagtgacagattactaggacctcattatgtggtagaagtaatgtaggggaaatggcgattatctttttttaaaagcaatagctgttgtatatcaatgataaatgaaaaattagttattcttgtaaattgaagaaagaatggttatcatagagggtagttcaagtaaaagaaccagggctgggtgtggtggctcacgttctgtaatccctgtactttgggaggccaaggcagatggatctcttgaggccaggagttcgagaccagcctgaccaacatggcaaaaccgtgtctctacaaaaaatacaaaaattagccggacatcgtggtagatgcctgtaatctcagatattcaggagaccgaggggaaaatcacttgaacccgggagacggaggttgcagtgagctgagatcgcaccactgctcgccagcctgggcaacagagtgagactctgcctcaaaaaaaaaccaaaccaaaccaaagaaccagaatagcatgtgcacatatacacagacgtttcacaactggcattatgttttgctactgttttatttacaatgtatcacaagttttatgctttaataaaatttaatcataacttctaatgaatcatgtttcttctgccaccacagttttatctcacctcagttgggtatttcataacagatagtaatagtgcaccattaggctctctaggttgaaggagtcttgcaggggaacatgaggtttgtgctttaactgtggcaactgacatccagtatcctcccctttaatttgttctcatccaaaactaatccatctgtttttctttaataagtgatttttcaagtttgcacttactttttcctttacattacactttaagtaagagtcactgttattagtgctttatgtgtaataacaacctgtgagataagtactgatgttattcacatatcacaaacgaggaaacttagggccaagatgctttaaggactcatccacatccctgtaagtgggtgaatcaggattcacgtttggctgcaaagatgagtgatatagtttggatctgtgtccctgcccagatttcctgtcaaatggtaatccccagtgttggaggtgggacctgatgggaggtgattggatcatgggggcagattcccctgtggtgccgttcttgtgatggtgagttctcatgagatctggttgtgtaaaagtgtgtggcacctccccctctctctcttccttctgctctggtcatgtgaagtgcctgctcccactttgccttccgcaatcattctaagtttcctgaggcctactcaggagctgagcagatgccagcatcatacttcctgtacagcatgcagaactgtggccaattaaacctcttttcttcataaattacccaatatcaggtatttacccaatatcaggtatttcttcatagcagtgcaagaatggaccaatacaatgaatgtgttaaccatggcgatccactaacatggctagttttcttttctttctttttttttttttttttttgagatggagtttcgctcttgttgcccaggctggagtgcaatggtgcgaccttgactcactgcaacttctgcctcctgggttcaagcaattctcctgcctcagcctcctgagcagctgggattacaggtgtgcaccaccaagcccggctaattttgtatttttaatagagatggggtttcaccatgttggtcaggctggtcttgaacttctgacctcagatgatccacccgcctcggcctcccaaagtgctgggattacaggtgtgagccaccatgcccagcatggctagttatttctatctttcatgtacttgacatcttgacttaattttgttagtatcttttgtcatagtggtttatctttacacataattgtgactgtagtaagtattacatctatatttttatttcatgggccaaattactataaatacatacttaaataagatataaatacactgattaccacataatcccagaagaaagattgtccaagatgaaattgcatttattgacccaagaatggttcacaatttatgatggagagagattttcctcaagcaaggaacaagattcaaataccagctgttgaaataattgcacaatattgtgagctaagctatagaatctgaaatgtaagacataaaacattggccaggcgtggtggctcaagcctgtaatcccagcactttgggaggccaaggtgggtggatcacaaggtcaggagatcgagaccatcctggctaacacggtgaaaccccctctctactaaaaatacaaaaaattatctgggtatggtggcacatgcctgtagtcccagctattcacaaggccgaggtgggagaatcacttgaatctgggaggcagagtttgcaataagccaagattgtgccactgcactccaggctgggcaacagagtgagactccatctcaaaaaataaataagtaaaaaaaaaaaaaattttagcgtacagactaaattattgattttagataatataattatttgttcattaatggatggctattaacagcaactttattataattaatgtaataattgaaatatactcaaaagatgtaaaattgtacctggaagatacggaaatgtgttcattaagtaaattgatatagttagatttgtagtgagttcagagttaacactggaatttaaaaaacaggtttgttgagatctaatttatatccataaaattgtttcattttaagtatataattcattgacttttaatacacttgctataagttgtgaaaccatccccacattcaaatcttagaacatttctatcagctgcccccgaaaagatattttttaacaaaaaaaaagaaaaatatcacatgatatatttgaatgtgtaaactgccgaagttatattggtatgaaagccacactggtgacattaacgttttctaaaatgtttcttttgtgaactccggagggaagttactctcactgtagtcaccagacaatagagatgtcctgtttaaatgcaattattgtctccgtttagcacatggtaaggccagcattggagaaaagacgcatattctagccacgttcacccagacacatagtttctgtaataatgagatcactgtattccatttttaacgtcattgtatgcatagaggttttacaataattactctattatcctgaaaataatatcagggactcttgtatggcagctaaatcagagtttaaaaccacagaaaagtttaatctcacattgaatgctacatagataaaatatcaatagtcaccatcagggattggtgtgggggataggacctctagtctgtctccacagactcagtctgtatctcagaaattatttctcctacttttgtatctttgccacaggaatagtttctactccagaggaatctcctttttcagatgtgagcactcacagagacccagcatactcctgtttcccttacatacagactctgcctcacattctaaaatagaaaatactcatctgatttcttcttactgccaggactttgggcttagtatgatgtcctagtgtgtgtagggggagggagccagccagtctctgagttatgagtttgtcatttgagataccatcttttcatagaactacaatggtcaattcaccatgagtgcatgcttgcttctgaaaaacttttcattaccaattatcagaaacaacttcaagttcctaatgaacatcaccaaagagatatttggagtgttatgtagaggccgttctatttccaagatccgtgaagacagactgtggctcttatggaggaagcagaaaatgctgaggtctgaacacctgatggacagtaatgctgaaaatctttgtatttgcctattgggtttgtggatctgcttcagtgaaatgttcttaaatatctttgcctttttctaattcatttttaatagactttttaaacagcagttttaggtttacaacaaaattaagtggaaggtagagatttcccatatacactgtacccccacgcaaggacagcctcccccattattaacaacccaccagagtggtacatttgttacaatcaatgaacctccattgacgtatcattatcacccaaagttcatgtttacattaaggttcacttttgtgttgtatagtctgagtctggacaaatgtatgaagccatgtattcaccatcatggtatcatataaggtacttttactgtcctcaaaatcctctgtgctccacctagattgtcttccttctttcagttctatcacttgtttcacacgttttgcagctctctgtcctatattgtcaattattcccaattaattatcaccctcctatgaaattatacaactctgccctttgatatcaggcatggcccttgacttgaggcaatgcttcaagtcaaggattgaaattccttgcccaatttatgataggcttggctttgtgaattccttggccaatttggtgtgagtagagatgacatgtttcaatttttaaaaatatttttttttaaataagaaactatcaataagttggagaaactgtcaacttatttgttgattgtccgtgtcaattttctctaattaatttataatcatttagactattttcagctccttaaaaaattgtttctcatgggtatgtcctttggttgatataagccaccttcctcaagtaggtcaatgtcattcttgtagcttttttctttattcttaggcttattgcaggaatgatataaaattctttgctcagagaaaataactaaaactcccccaaaggcagttgactcaccagagttctcgaatgacttggaaatcggtaaaatgcagattcccaggctgcatcaagcccagctgaattcatctggacagtgtttttgttttcaacagttttactgagatgcagctgatacatagttatgcaccgcataacaatattttggtcaataaaggactgcatatataatggtggtcccattagaatactgtatttttaccataccatttccatgtttggacatgtttagatacacaaataccatggtgttacaattgcctatgataacatgctgtccccatttgtagcctaggatcaacagtctatatggtgaaaccctgtctctactaaaaatacaaaaattagtcgggcatggtggtgtgtgcctgtagtcccagctgctcaggaggctgaggcaggagaatcgaaccatggaagtggaggttgcagtgagccgagtctattgtaaattattgtaaaaagtctatatggtttagcctaggtgtgtagtaggcgatcccatgtagctttgtgtaagtacaccctatgacgttagcacaatgatgaaatcaacaaatttctcagcacacatcctcatcattaggtgacccatgactgtgctataaaaggctgcacatattgagggtgaggtcagcttggggccccacttgctcagggggcaggctctacccagacagctggcacccctcagctatatgcatccatccttaggcagggaaaactcaagagtcatctctactccctgctgtgcgcaaccctttgagtacctggttctgccaagaaagctacaaaattgtgcggctccagggcagcaactcgtggatcatgctcccgaggcctggtgagagaaacttgcctgttcgaatttaaatggaagctagaagaggcttcatttgcttcttctaaccctctcttttctctgctactaatatggtatgtcctgatagagactgaatcttaccctgaatcccagcatcgcattgtggaactaagtgctgaataataatagttctgaggaagaaataaacgtttgttcttgcaagcctctgagaattcaaagatatttgctaccacattacaacttccagaaagctgaaagtacactttcaatgacctgttttttctttactcaccttaaccttccaaatccacagttacagatagtagctcattatctccactacttgtacgaactttgaaatctgcatttgagaattttcttcatatgattactttcttcctttccgttttatatgttttacttccattagaataaccatttattttaggctgggcgcagtggctcacacctgtaatcccagcgctttggatttgtgctttggcgggcagattacaaggtcaggagtttgagaccagcctggctaacatggtgaaaccctgtctctattaaagatacaaaaaattagctgggcatggtggcacacgcctataatcccagctactccggaggctggggcagaagaatcacttgaacccgggaagcagaggttgcagtgagccaagatggcaccattgcactccaccctgggtgacagtgcgagactccgtctcaaaaaaagaaaaaaaaaccatttatttttaattcatctagaaatatattaccttttattatgtgaccaccctcaatgaactatttgttctctcacttataactttacccaattggtttatcatcatcagatatttgtaaatatcttcaagaaacttgccctctttcaccctgcctccttcaccttactaatcatcagaatcagacatgctcagttactgactatggtccccttacaatcaggaagttcacattgatgacaaaacaaaaacaaaaagaaaaccccaagcaaacaaacaaattaaaaaaaacctctagctctactaaaaatacaaaaaatagccctctccctctccctctccctctttctccctctccctctccccacggtctccctctccctctctttccatggtctccctctgatgccgagctgaagctggacggtactgctgccatctcagctcactgcaacctccctgcctgattctcctgcctcagcctgcccagtgcctgcgattgcaggcgcgcgccgccacgcctgactggttttcgtatttttttggtggagacggggtttcgctgcgttggccgggctggtctccagctcctagccgcgagtgatccgccagcctccgcctcccgaggtgccgggattgcagacggagtctggttcactcagtgctcaatggtgcccaggctggagtgcagtggcgtgatctcggctcgctacaacctccacctcccagccgcctgccttggcctcccaaagtgccgagactgcagcctctgcccggccaccaccccgtctgggaagtgaggagcgtctctgcctggccgcccatcgtctgggacatgacgagcccctctgcctggctgtccagtctggaaagtgaggagcgtctctgcccagccacccatcgtctgagatgtggggagcgcctctgccccgccgccccatctgggatgtgaggagcacctctaaccggccgcgaccccgtctgggaggtgaggagcgtctctgcccggccgccccgtctgagaagtgaggagcccctccgcccggcagccaacctgtctgggaagtgaggagcgtctccgcctggcagccacctcgtccgggaaggaggtgggggggtcagccccccgcctggccagccgccctgtccgggaggtgaggggcgcctctgcccggccgcccctactgggaagtgaggagcccctctgcccggccaccaccccgtctgggaggtgtacccaacagctcattgagaacgggccatgatgacaatggcggttttgtggaatagaaagcggggaaaggtggggaaaagattgagaaatcggatggttaccgtgtctgtgtagaaagaagtagacatgggagacttttcattttgttctgtactgagaaaaattcttatcctgttgatctggaaccttacccccaaccccgtgctctctgaaacatgtgctgtgtccactcagggttaaatggattaagggcggtgcaagatgtgctttgttgaacagatgcttgaaggcagcatgctccttaagagtcatcaccactccctaatctcaggtacccagggacacaaacactgcggaaggccgcagggtcctctgcctaggaaaaccagagacttttgttcacttgtttatctgctgaccttccctccactattgtcctatgaccctgacaaatccccctctgcgaggaacacccaagaatgatcaataaaaaaaataaaaataaaaataaaaaaataaaaaaaaaaacctctaggcttaggggctttgtgttaaatgcgagttacaataaaattgccgacgttcatccaagggtgctgtttcccaatgtgtcatacggcaacagaaaatgtcttccaactggggtgtttagaccacttccttttaaagtgattattatatggttaaactatcttggtattggttttgtttttgcctttgttctttcttctcttttctttcgttgccttgggttttgttttgttttgtttatgtagactggaagtccatattttatttctctagtgacatatttacagttcaatataaattaaaggcctgcttgtatgccaaatccaggtcccttgggtggttcagtcaaaggggtaagacctccagctggctcacaagagaagcgtccactccttggcccaggttttgggattttgccagccttgagctcatcaataatttcttcaatatccttagctgtcaaatcttcatagtaattgtcatttatttgaaccattggtgcgttcacacaggcccctaaacattccacttctacaagagtgaaaagtttgtcaggtgtagtctccccaagctttattccaagctttttctgaatggcctccagtatgctgtcagagtttggaagcatgcagggtgtagtagtgcagacctgaatgtgatacttttcaactggctttcgattatacattgtataaaaagttgctacttcatatactcttattggaggtacttgtaaaacttctgcaaccttgttcatagcagagatgggcaaccacccattctgcctttgggctaaatccaggactggaagaacagctgctgctttatggccttctggatagttttttacaattgcctctatcctcttatagttttctggtgtgaaatcaaatggagtatcagggttattctcaggagtatctctgtgcacaaataaagctcctccagctccattttgcatagctgtcttatgcaattcctcacatgtcttccggtggggctgcagcggcctccctaagagggctaaggccgtagtgtccttgccgccgcctgcaggcccgtgtagagcccagggctctcctgcgcccaaaactaagggagacacggagagcaagagaagggcggcggcagcgccgggctcagcttgagcctccttacccagtgggcggtaaggccagcggcccgggcccggagcgccgcggagaaggcctttgggtttttaagtggctctcttccaattccttttttggctttagtgttaacgataaccaaatttttagcatttgctttaggggggttatactatacagcttatcacagcctaccttccagtgattccatacgacttcatgtaaagcatcagatccttacccatgtatactttcatttcacaactgttggtgtgtgtgctgtcattatcatacatctaacttttagataacctacaagtggctccagggcagcaactcatggatcatgctcccgaggcagattgttattttctaaacagttacattttaaagagatttaaacggaagaaatacgtttaaaaattacccatgtggggccgggtgcgttggctcacgcctgtaatcccagcactttgggaggccgaggcgggcggatcacgtgaggtcaggagttcgagaccagcctgaccaacaaggagaaaccctgtctctactaaaaatacaaaattagccgggcatgctggcgcaggcctgtaatcccagctactcgggaggctgaggcaggagaatcgctggaacccgggaggcggaggttgtggtgagccgagatcgcaccgttccattccagcctgggcagcaaaagcgaaactccgtctcaaaaacaaaaaacgaaaaacaaaaacaaaaacaaaacaaacaaaaaaattacccatgtggttactatttctggcactcctcattcttttgtgtagatcatgtgttacgaaacacaagtcaaatatgaattactgagagaggaggcagggcttggactccagaccagattgaaaactagctgaaacagggaagaggcaaaagcacctctccataagacacgccccccattgccatgtcagtttaccactgccatcgcaacacctggaagtgaccacccctttccaccgcaatgacctggaagtgaccacacccgttctagaaatttctgaataacctgccccttagtttgcatgtaattaaaagtgggcataaatatgactgcagacctgcctctgagctgctactttgagcacactccttttggggtagccgtgccctgcaaggagccgttcatctgctgctgctgttgccgccgctccaataaaagttgctaccccactttgggaggctggggcgggtggatcacctgaggtcaggagtttgagaccagcctgaccaacatggtgaaggcccgcccccatctctactaaatatgcaaaaattagctgggcgtggtggcacaagcctgtgatcccagctactcaagaggctgaagcaggagagtcgcctgaacctggaaggcagaggttgcagtgagctgaggtagcgccattgcactccaggctgggcaacaagagcaaaactccgtctcgggggggggtgggggggaggtgctacccactaccagttcacccttgaattatttcctgagcgaatccccagtctgggggctcacctgccctgcatcatcaccatctgtttttaaataatgtttacttggaacatggccaaacccacgtgtaggtactattgatccattaaaggcagagtagggtatttgcaaccgtatagcctgcaaagaataaaataccacttggccctttaaagtttgtcgatttctcatgtagagtcatattctcttttttcttttgagaccgagtcttgcttttgtcgcccagactggagtgcagtggtgtgatctcggctcactgcaacctccatctcctgggttcaagtgattctcctgcctcagcctcccgagtagctgggattacgggtgctcaccagaacgcccggctaatttttgtatttttagtagacatgggatttcactatgttggccaggctagtctcgaactcctgacctcaggtgatccacccgcctcggcctcccaaagtgctgggattgcaggcgtgagccaccgcgcctggctgagagtcatattttcatcacatatctgaattacaataaagttggggcaataaagcgtacagtcagttttgtaatccagtgtaaggggaacacaaggtttctcctaattggaaaagaataactggtaggtcttttcccttataccagggaaaacataggaaatacgtgattgtgttgctatttgatttgaaactacagtaatggctgggcgcagtggctcaggcctgtaatcctggcactttgggaggccgaggcgggtggatcacctgaggtcaggagttcgagaccagcccaaccaacatggggaaaccccatttctactaaaaatacaaaaaattagccgggcgtggtggtgcatgcctgtaaccacagctactcagagaattgcttgaacctgggaggcggaggttgcggtgagccaaaatcgcaccactgcactccagcatgggcaacaagagcgaaactccatctcaaaaaaaaaaaaaaaaaaaaaaaaaaaaaaaaaaaaaaaaaaaaaaaaaaaagaaagaaagaaactacggtattttatgtgaaaataatttttgatgacattgacagtaaagataaaaactggggcttaaaaactccactaattttacttgacatgcattcataagaggaagtagcaacatacccctaagtggccccaggggtagatggcagaggtgtgtatcctaacaagtctttgcagaactggtatcatcaaatctctcagacagttttgacaaatggtatttactatcttttcattaactcattacctcaccctacccccacgtctccccagcagctgagaggctcctgtaaataaatttgtctgtgcattccacaaataggtcatcatgattctggatccacacttgtatcttaacccctctaggaaaagaattgttacaagaatcaacgtgcaaaaatataaacagtttatataggtgttttgacttttaggtcccccgaaataaaaaaattgtgaaccataagaagtctcaaattttaaatgtctccaacagatatgatcacacacctcaccaagccacgcgctgattgtggatattcctcaatcattataaacatgttcccatcctgacaattttctccatttcctctgcccaattatttttccccatttgtatctatatgacagagtccaattactgattttgctcaaatatcatcttatcctatgggtatttcctgaacagtttaaattaggacatcctgtcactctgtcactacatgtacactttgttgaacttatcctcctattataattattgctgacttacccgtatagaacataagatacttgagagcagggaactggttcagtttcttgctagatcatcaatgattagaataatccctgagagcagggactctgtgcgtttgtattgaatgaatgaatgaacgaatgaacgaatgcatttttttcgatgcaaagaagaaagttactgcaatgcataggctcgtagattagcaggtcataattctacttttattcccacattttgtatctcaggcaacatgaactaaatagatccacctcagcagtggaaaaaggttttcatgaagtttttctaagccatgaaaatggaagattcactctcaaatgctgcattctattcccagtgaaaaataacaatcttatttgtcaggtagaaaaatttttgtaacgacaatctgaaaaacagggactaaaaaacaagtaggaagtttatctttctcacataatagcaagtccggaggctgcagtttgggatgtggcagatcctcttgagaagtccattctgcctactctacctccatcagcactcagccttccttctccttgaggagaatgcagatggctggtgtatgactgagaagggtataggataaggggcaaaaccattttcattttgaggctttgtcttgtttacctgaaaacaatatttccatatttttttcccaaagaatattaattctgttaaatggctactgtaattttaatgaagaacggggattttcaaatttcatattcacacatcaaaaacagaggaagagaaagaaacaattaagttagaaagccaggaacagtggctcatgcctgtaatcccagcactttgggaggctgaggttggaggatcgtttgagcttgagcacaggagttcaagaccagcctgagcaacacagtgagacctcatctctacaaaaaaattaaaaagttagccaggtgtagtggcaacacctgtggtcccaggtactcgggaggctgaggtgggaggatcatttgagcccaggaggttgaggctacaacaagctgtgatcacactactgcactgcagcctgggctggacagagggacaccctttctcaaacaacagcaacaacaaaacccacaaacatgttgcagaccaaatacctgttaccaattatattaatgacaacgtggtcaccataattttgggaagagccagattacattaactgactttgttctttatcctgagagtctaatattatatatagcctatcgcctgtcttttgggtgttcaaaaagaaagacaaaaattattaaacgtccttactgtttttttttaacttacagatttacttctattgagctctatttgtatctaaataaaaatatttctccaagttttaatatattctaattccactatcaaggtaggaaaatgaatttgagatttaaaaaaaaattcatgccctcttaccttaaagtgagagaggtaaacacttccaaatgtattttcatattagactataaccgaaaggtaatctgttatatcataacttggggattttcagagggagcctatatttccaatgaagcattaaagaccttcacaggatttccttgcatatatagaatatactcaattgagggtgaacatttaaaatgtttaaggctatatttgttccaaaaaatgaataatcccatcttgttttagttttcaatttgtttagtttccctttttattcgttgcttttccacatgtaaaatatttttgtctctaaagtcaaaattatattacaaatatatgaaaatccctattctgttttgccttctcaaactttttattttcttaaataggtttcttgataggtattaatttcagattttttttatcacaaagagaataccatatatgatattctataccttgttttttaggtatggtggtgatcactccaatatgactttcctcattctttttttttctttttttttttttgagatggagtctcactccgttgcccaggctggagtgcagtggcgcgatctcggctcatgcaacctctgcctcccgggttcaagcgattctcctgcctcagccaccagagtagctgggattacaggcatgcgccaccatgcccagctaatttttctatttttagtagagacgggatttcaccatgttggtcaggttggtctcgaactcctgaccttgttgtgatctgcccacctccgcctcccaaagtgctgggattacaggcatgagccaccgcgcccagccctgactttcctcattcttttaacagcttcacatacatagccaacattcccctaatttctcagccaccttgcctcaagttaaaaccatgagaccggttttgccaaacagggtgtaagtgtaatgtatcactttcaggccaaaccacttaaaactaagtgtgaccttcttgcttgtttcctttgcaataatcagaggcccatttttgagatagagaaaccataatatggaagcccctccatctctgagttaccacataagcatcagttgccctacagggtcaactatcccagtggtgcaattgacagaaaagactcattttatacagtaagcttccaggatttaacaaaaaaggttttgtatctccgggcaccacaggacatgccattccttacaagacttttaaaagcaaagcctagacagctttagcaataccctctttcttgacaaactgttagagatctaggcctgaagggcaaggaaaggacaataaagtctgtctttctacatcatttgcttctcagtgatgctcatcaaattgctatcaatcactgtgtcatgtttccactgccaatttttttagatattcacaatacagcccccaaaccccaacctatcctgtgtcttagtccattttttgttgctgtaacagaaaacctgacctgggtaatttatatgtatgtatataatttatgtatgtgtatatatataatttatttcttccagctctggaggctgggaagtccaaggctgagcggctacatgtggtgagggccttcttgctgcatcataacagaagtcatcacatggtgagaaggaggaagcatgccagctcagctctcttttcctcttcttataaggctactaatcccaacatagggagccacccccataacttcatctatccctaattacctcccaaaggctcccacctctaaataccatcaacatatggatttgaggattcaatttccaacatgaacttttggggaatacatttgaacatggcacccagtcaccatttcctaaaagaataatactgcaggtacccaaaacaactgaacaaagacattaggcaccatttgcattccctctcaaagtttctaaaaccatctccagttttgaggtcaatatgtctcagctacttttctatactgcaatgtcctttgtccacttaacagtaccaccactgcaatctggtgctcagaactgttttccagaaggcgtttcctgtatggttcttgctaaactttgccaatgagaaaaacctgaatgggccaggcgcagtggctcacaactgtaatcccagcactatgggaggctgaagtgggtggactgcttgaggtcaggagttcaaaaccagactgggcaacatggcgaaaacctgtctctaccaaaaatacaaaaattagcccgtctcttaacccggtctcaaaataaatagataataaattaaaaataaaaaaaaatttaaaatgctgttaaaaaaaaaaaaaaaggaaaacctgaatggaataggaaaggcagaagtgaagcactaagccattaatctcagatgaatactgcacagacctcaccatctctaatcccaatcaagcagccagaagcagtaacttctaagacatctccatgagctctggtttctcactgaagctgccagtgactatttttctttgatattcctgctggagtcttccacacctttcactgctcaagcacctccaaaattctttttattttatttttttttttttgagacggagtctcgctctgtggcccaggctggagtgcagtggcacgatctcagctcactgcaagctccgcctcctgggttcacgccattctcctgcctcggcctcctgagtagctgggactgcaggccccccactaccacgccccgataattttttgtatttttagtagagacggggtttcatcgtgttagccaggatggtctcgatctcctgacctcgtgatccgcccacctcagcctcccaaagtgctgggattacaggtgtgagccaccgcgcccagcaaaaattcttaacatataactattcttattcttgaagtaattgtatacgttttcctaaacacagactaatacaatcattcagaataaagctaattccatgttttcaaagtttattcatcacaatctgtattactgtattggtcctgagtctcactctgtcactcaggctgagtgcagtgtcagtcatggctcactgcagcctcaacctccctgtctcaagcaatcctttcacctcaacctcccgagtagctgggactacaggtgcatgccatgacacccagctaattttttattttttgtagagatgtggtctcactatgttgcccaggctagcctcgaactcctggacacaggtggtcctctctcctgagcctctcaaagtgctgagactacaggtatgagccatagaacattgccaactttgccgaaatccagaatgctatcaagaaagtggaaaaacagtacacagaagtggaaaaagtactggcaaatctcataagggtgtagtattcagaatataaaataactcataactgaaccaaaaatacacaatctaatttttaaaacattaaaagaaatgtctgagtagacatttctccaatgaagatgcacatggctaataagcataggaacagatgctcaacattcatcattaaggaaatccaaccacaatgaaatatcacttgtaagtgactagaaggctatatactactactactgtgaacccaacaactacaaacatcaataatcgataggaagtgcagaaaatggaacactggaacatcgctggtagaaaagtaaaatggtgcagctgccttcgaaaacagtttggtgaatccacaaaaagataatcactgataattactatatgacccagaaattccacgtttacagacatacccaagagaagtgaaaacatgtatgtgcaaaaacatcttgtaaaaagttgttcatagcagcattttccataatagcctaatttcttttttttttgagacagagtctcgctctgtcgcccaggctggagtgcagtggcgtgatctgggctcactgcacgctccgcctcccggattcatgccattctcctgcctcagccttccgagtagctgagactacagatgcccgccaccaggccagctaattttttgtatttttagtagagacggggttttgccatgttagccaggatggccttgatctcctgacctcgtgatccgcccatctcggtctcccaaagtgctgggattacaggcatcagccactgcacctggcccataatagcctaatttcaaacagtagaaagagttcaaatctccatcaaataatgaatggacagacaaactgtagaatattattcagcaacaaaaagtgatgaggtattaggctgggtatggtggctcacacctgtaatcccagcactttgggaggcctaggcaggcagatcacttgaggtcaggagttcgagatcagcctggccaatatggtgaaaccttgtgtctattaaaaatacaaaaattagctgggcatggtggtgcatgcctgtagtcccagctactcgagaggctgaggcaggagaaccgcttgagcctgggaggtggaggttgcagtgagctgagattgtgccactgcactccagactaggcaccagagttagactctgtctcaaaaaaaaaaaaaaaaaaagttatgaggtactaacaaatgttaattttgggtgggtggtattttttatagtgacagtttgcccaggctagtctcgaattcctgggcttaagcgatccgcccatcttggccttccaaagtgttagaattacagacatgagccactgtgcctggcctagaaattgattttttttttggacagggccttgctctgtcacctaggctggagtgcagtggcataatcctagttcactgtaacctccaactcctgagctcaaggaattctcctgcttcagcctcctgagtagctggcactatagaaatgtgccaccatgcccaactaacttctaaatttgcagacagggtcttgacatattgcctatgctagtctcaaactcctgggctcaggcaatctcctcgcctgggcctctcaaagtgctgacattacagatgtcagcctccctgcccagccggctagctgaaaatttaaaccacagatgagtattcactccagccccaccagataaacatcataacaccccaagtcaatcatctttcactgccttctctagccattttttaaccagcttgggaagtctaccctgttctctccagaaagccttttgtaataaacattcttataatactttgatgtagagtaccaccaatcctgaaatctaaaccaaactttgcacggggttccctcctgttccagtggagtggcgacaagtgcaaatcagtaaaaaaaaatgttttgggggtaaatacatgaggtttctagtttctttaaaaaaaaaatccattgcttatgttcattattaaggggaaactcatgaacactgatttttttcaaattatttcacggagtgctccaagtacaaaaaaagaagttgtgttattatttcagaaatttcatttactaataattttcatatgcttacatttgttattttcctctcatgtaaaaggcatgcagaaataaagttatgtagaaaaaaaggcatgtagaaatataactgcacagtgcatattcatgaacaggaagacaggtttcagggggtctgatattgtcccactatggcatggcattttcattatagccatagaagtcatctagggcagagtgtggagaaaatatttcaagtgcaaattatgaatatatacttcttaaattgtatactgtttgaacataacatggatagaaattgttatagatgacattcaaccttgagagtctaatgatgtattatagtgtttgatattaagtgtcccaatgaggtgggatatgcttgggttgacggaaggcacacgattcattcagggttactaaaaatgattatattttactaattaagacataagaagtataatatattctaaataaaatggtatcaaatgcaatctcaggggccaaatgtgaatcccctataagaacactactctggttcttttgatggaactgtcctctatggtaaccattctctcttcagtttccaaaaataagacctatctatgttcaataatctgtgatatgcaacagtaactacctttcaagagagggtgactatcattccccctccatttctttctaccacatatgcagtctctagtaaccgaccatttcacttccatgaaaatctctcaatgtcccaccctactcttcttgtttcatggtcatcttgtactgtaaccaatctctcctataatcgacaaaggtccccagtcacatcaacaattctaaggggtcctgaccacataaagcatatatgttagacaatagttttacctctcttctggcacaaacccccatgctcttatagtatattgtatattagtgttcttggctgggcacggtggctcatgcctgtaatcccagcactttgggaggccaaggcaggtggatcacctgaggtcaggagttcaagatcagcctggccaacatggcgaaactctgtctctactaaaaatacaaaaacaaaaaaacaaaaaactagccaggcatgatggcgcatgcctgtaatcccagctactcgtgaggctgaggcaggagaattgcttgaacccgggagacagaggttgcagtgagctgagatggtgccactgcactccagcctgggtgacagagcaagactctgtctccaaaaaaagaaaaaattagtgttcttgctttttccaggtttcagtaatataaagaagccacacctaaggaagtagtcccttccatcttacatccattccttgagacaatcatgataaatgaaaagcatgccatgaagatttaacagcaacagatttcatacttttaaaaatatgaaataactgaataaaaaatttttaacactgaagttacatctttccacagatgtccttgctcctctgacacacaccatgagtttgtgactttttaaaattgtctgtgaatttaacatcaatcacttaatcttcaagaaggaaaaaagacttagttccctctagcctgaatttttgtatgacaaaatgcttgcatataaggatgaatttccattgagaaatttaaaataatttaccaccttcacttgtaatgcttctctccaatatgaatggtgtatcctgaagtcagaacattgcttaaaggacttgccacatttgtatggtttccatcctgaatgtcttctgttataaccataatagggtaaatatttttataaagctgttcacattcattatatttgtaaggcttctctacagtaagaattctatgatgttccacaaggcttgaactttggataagccttgccatacatgttatctttgtgtggtttatctcaaagatgtatattctggtatcaagtgagacataagccatagctaaaggctttaccacattttcgttttatatggtttcttttcacaatggagcccctgatgctaggtacagcttgaatacttaatttttgtctcattatatttgatatgtttttctctattataacttttttgatgatctccaaggtttgaactttggaataaagcattaccatgtatattatgtttacaatgtttcttttcaatgtgtattttctggtgtctagtgaggtttgcaaattgggtaaaagctttgccacattcagtacatttgtaaggtttctctccagtatggattttcttatgctgagtaagatttgaacgttcagtaaaggctttgccacattcagtacatttgtaaggtttctctccagtatgagttctctgatgaccccaaaggtgtgaacgtttgataaaagctttatcacatttattacatttgtaaggtttttctccagtgtgaattctctgatgttccacaagacttgaactttggataaaagccctgccacacacattacatttgtgtggtttctctccaggatgtatattctgatgcctagtgagatgtgagcactgcttaaaagctttgccacactcattacatatgtaaggcttctctccagtatggattctcttatgttgggtaaggcttgaacgttcagcaaaggctttgtcacattcattacatttgtaaggtttctctccagtatgaattctttcatgaccccaaaggtgtgaacgctggataaatgccttaccacattcattacatttgtaaggtttctctccagtatgcatcctctgatgacttgcaagatttgaattttgactacagaccttgccacatatattacattgatatggtttctctcctgtatggactctctgatgcctagtgaggttcgaacactggttaaaggctttgccacactcgttacatttgtaaggtctctgtccagagtgaattctctgatgattagtgaggttcgaacttttgctaaaagcctttccacagtcattacacttgtatgatttttctctaatgtgtgttctcccatactgtgtatgtaataaagggtatttcaaaatcttcctatatttattacaaatgtttttgacacaaggaggaagtggtgaaactgaggaactattgatagacttctcaactggattacattcatacattttctccccagtttgaaatctctgtagttcagccagctgtgcctgtaagcttaatccaattttattttcaaaacacttcacgtatttgtttccggcataccttatgttatttttcagttttaacaaattccttataaatggcttgtcatggatgaaatactggtgtgcactatctcttatagaaacactctgctttaaagagaaatgtattgaggatttattatgttgttgatcttttctgtgagtgagatttttgttacaggtcaaaggcattcctttgtaattttttacatcatagtcccacaggctgtcaaacttaggcatattttcccagacttccttgaggtcaaaattgttgatgccatggctttcctttctttctaatatcaccagatggtataattcctctttattattttcctttggtgataatcccttgcttgtaaatccaacagaaatatctgaaagatattaaaaaaaccacaggctttccatcaaatagagttgcaaggtaaatattttattaaaatacatattacaagaaagctaagatttacaatgaacagagttatgaagcttctcaactgtctttaaacgtttaacaacacaaagggactagctgtcctcaataaagtaacacagtaacaaaacatgtaacaaattattttaagcacagtttaaaacaccctatagctaaaacactcatactatgtaaatccacataaactctgaaagaagaggtatttttccaccaccactccaaggaacacgtaaattggcatagctatatggtagtctcatatttgaagataaacaaatagtaatgcattatttagtacataattattacacacaaaaggtaaggcacagctcaagcttatctaataaaaaatatttaaaaatgacaattcataattgcaaacaaaacactgaaagaaaaaattcggaagaatttaataaaattttgaatatttacaaattgcaaatgtgagtacttgttataaaactacttacacccatgtagaatgtgcattttgcagcattaacaatttgtgcatggtggttctattgcataatatatactgaaaaaccatcatctgtaaatcattacaaaaataaataaaacactttagtaacctgtgaaaatctaacaggcaagttaatgaacaaccacaattacacaaaattgtcagtgaaattctaaagaattactgcttatgaactacagaaaaaacagaagggacacacaataggaaaaataatatgttgagaatcactaaattttgaaatatcagcttcaggtaaatgcacattactataaagatgaagaattaggaggggagtctgaaataatttcatgcctgcagttatatgacagcagtatatagagaaactccctgactaggaaatgtcatctagttttccagttctatggccaaaaaatacatataatgaaagctgtgtgctttaacattttattatgtagagtcagagaaatgttgatatgaaaaaaaaaattacaaaaaagaaaatatgtaagatataatgaaggcaaaggtcaatctcataagaaacatgacagacacttgacatatcttattcataaaggtaacttttcaaagcatactaaatgctatgcaagttactaaggtctctaacagcactaattgatgtaaatcctcttgaggtaaattatcgcaccttttcataccaaaacaaagggctgaagaggtttacatatctatccctaactcacagagaaagcacatctgaaagccagaatctgaacctgtgtgtgcgggctaagatgccatgttcacagcattaagcaccactggccacccagggcagcacggattataaatcacagcaaatacgaggagtgtaggaagaaatgtttcaaggcagattatgggacctgagctgtgtcacctatagtgtgacagcaccactgctctcagatagcatttaagtcaccttatcttgcacaagttgtttagacagtgaccagatcatgttgctgtcctgagtaagctgtcctgtgtataagcaggagtcattctttacacagtgtgtgcaatgaagggatgttattctgtgctaaaaagaaatgagctgtcaagctataaaaagacatggaagaaatttattttatttatctattttttgagatggagtctcgctctgttgcccaggctggagtgcagtggcatggtctcggctcatcacaacctctgcctcccaggttcacgccattctcctgcctcagcctcctgagtagctggaactacaggtgcccgccaccacgcccggcttattttctgtatttttagtagagacggggtttcaccatgttagccaggatcgtcttgatctcctgacctcgtgatccgccggcctcggcctcccaaagtgctgggattacaggcgtgagccaccacgcccagccctagaaattgaaatgcatattattaagtgaaagaagccaatctgaaaaggccatatactatatggttccaactatatgacattctgaaaaaggcaaatctatggagacagtaaagagatcagtggttgccaggtgctggggggagggagagatgaacagacagagcacagattttttagggcagtgtaattattctgtaagatactattatggaggatatatgtctattatatatttgcccaaacccaaagcatatacatagagtgaaccccaacatcgactatggactttgggtgataatgatgtgtcaatgtaggtttatcaattttaacaaatgtaccactgtgatgggggatggtgataatgggggaagacgctgtgcacgtgtgggggaacagagtatacaggaaatctagtttgctgtgaacataaaattgctaaaaaatagaaagtctatttttaaaaagtataagctaagagttgatataaagttacaggaaacagaagtaaaaggaataactaatactatcctttaacaaagttttggaggttatatatgttttgaggaaactaatactcagacataaatactcaaggaagaaatcttctggtaaaacatataaaacatcatgaaagtatatgaagcagaaaaaaatatatataataaaacaatattcattcatctcatggccccacacactgtagatataaaacaaaaaacactaagagtatcatgaaaacatgtaactgctgattaaatacatacaagttcatttataccaatgacattggcaaaatgaaagtgtcagtggcttaaccaaattatactgaactttaaaaatgtatgcctaattcaactttgtaagctccctcaataaaggcataaaaatcatactgaagaaaaatgtacaactgcacgtatgggatgaataatgtggtatgagcaacagtttggtcaacatgttcgcagatatgaggttgagaacttggagaatgctcttcccaggagaaactcctacaccttgtactgctggctccaagaggatgatcagcatatatctaaccagcgttgtcacactgcccttgggagacactggaaactccacagaaaccagaaggtcagaagcacttatccctccggctgtcctgattctctctcagcatactgggacatgcaggctactctactcagtggcttcaagaggcacctctatgtagcagaatgatactgtgacagattaattaatgttctctttcaagaatgttctgtcaccaaggaaacctcttccatgggagagtccaccaaaagttgtccatcgcctattggtgggttatcacagcagaaagagaggaaatttcagactctaggaatgtgtacttttctttttctttttttttttttcgagatggagttttgctcttgttgcccaggctggagtgcaatggcgtgatctcggctcaccacaacctctgcctctcgggttcaagcaactctcctgcctcagcctcccgagcagctggtattacaggcatgcgccaacacacccggctaatttttgtatttttagtagagacggggtttttccatgttagtcaggctggtctcgaactcccgacctcaggtgatctgcccacctcggcctcccaaagtgctgggattataggcgtgaggcaccacgcccatccggaatgtgtatttcaaaagcaactttcagaggcaaatcttagaagaatatggaatcaggaagactaaggtctccctaagttcccggatagagtagaaagctagaaaagggagagaaataaaaggtacgggagtaaaataaaagggtcggattttgtaggattctaaggaagaggcagtgtgctctgtccacaggctgcaaggtgagaacctaaaagaatgagatatattcccattttggaatggcaatcaaaaagaggatctctctgtcaagtctttacattaatgctgagtaacaatctcaaaagcctgcccattcccctttagacacatgtggcaaaagcagaactgaaggaatggccaaggggcttgaacaagtagagagaccgacagtctttcaaatttcagggaaccccagatacattttgggggagccactgttttcccattttcctgaaaagttcttgcaggtataagaaataggaatagaaattgaataggttctggagccagggctacaaaggccccagctctgatctgtatagactgaaaaccacacatcagatgaaattatatacactaaaagagagtccttaaaaacagccatttcggtccctctcaaaaccaagagaccaaaatggtcagaggggccaaacagtattgtaggtcatgatagcacctttgcttttgtgtctgtatgagttggggcatcacgggagagtgggagttcaaccttttacacatttgaataacagtatgttgggggacagtaggagcgggtgtggaccttgctttgagagctcataagaaataaacttttgttttcccactgatctttcccatttgcagagtttcccaaacaatactcaatggagtagcttactctgtggccatctgagcgcttatttgtgctcacattccgacctacctgattttttccctattttcacttcactttccatagtctaggactctttcctgtgctccaaaatgaacacaatattcagctcaggaaagatttcaacttataaagaaaaaaaggaacatggtatgctgtgcttttcctggatacattcccagccctttgttcagctacgaagagaggacattacacatgggtctgcaaaactatttcccaaaacaatttcataaattagtcaacggactgccttcttctgaatgcttagggattattttaaatatgcagactctgaaaaaactactgaatcaaaggcacagggataaaaccatgataccagacactttaaaacgttttccataaggttttgtaagtactgatattctggaaccaccactcgtcaaacctgattatgcgcagaacttctgaagaaaggggaagtttaaagtctatatgctacattatgaagcctttccactctcaatcaaaaagtttcaatctccccttttagaacagggatcggattcagacaagcacatcagggcctcccaagagactcacaaggaaaaatgtaaagatgtacaagggtggttaccatcttctggagggatgttatcctcatcgagagaaagcaggttcctgtagttctccaacatcacgtccctgtacaaggccctctgggcagggtccaggcactcccactcctcttgagagaattctatggccacatccttgaatgtaaacagtccctgaaataaaaacacacttcaccaagtggacacaggaaaatttcttattttcacacaaaatggcagaaaagaggtgtacatattcactgatttatgtgagttaatgcaagcaacttatatatccctaattttattttttttaaactgagatgaaattacataacataaaattagctatttgaggctgggtgcagtggctcacacctgtaatttcagcaccttgagaggctgaggtgggaggactgcttgagctcaggagtttgaaacagtctggacaacgaagtgagactccacctctactaaaaaatttaaaaaattagctgggcacactggaatgggcctgtagtcccagctactcagaaggctgaggtgggaggatcacttgcacctgggaggtggagactgcagtgggcagtgatcatgtcactgcaccccagtcagggagacagagcaagacttcacctcaaaataaaacaaataaattagccattttaaagtacaattcagtggcatttagtacattcacaaagttatacaccaccacctctgtctagttcaaaaacatttttatcaactccaaaagaaatgccgtacccattaagcagtcactccccatgtgactttaacatgaaataagcttacccaaataggtaagtgacttgcatgctgcaaactatgaaatactaatgaaggaaattaaagcagacaaaacaaataaatggaaagatatcctatgttcaagaacttagaaaattaatactatgaaaatgtccatattatccaaagcaatctacagtcaatgcaatccctatcaaaatcacagtgacactttttacaaaaatataagaaataatcctaaaattcatatagaactataaagacccaaaagagccacagcaattttgagcaagaatatcaaagctggagtatcacacttcctgatttcaaagtatattacaaaggtatggtaatcaaaacagtatggtactggcataaaatagacacacaaaacaaaagtactagaatacaaagcccagaaataaactcacacatatacaatcaactgatatttgacaagtgtgtcaagaatacataatggagaaaagatgctgtcttcagtaaatagtgctgggaaatctgtacacccaaatgcaaaagaatgaaactggatgcttatcttatgccacaaataaaaataaactcaaaactgactaaagactcaaggtaaatttactcaatttaccttgcgtctttagttttacctgaaattgtaaaactcctagaagaaaacatagggaaaatgttcttgacattatcttggcaatgatttcttggatataacaccaaaagcacaggcaagaaaaggaaaaatagaccagtgggactacatcaaaccaaaacacttgtgcataccaaaagaaacaaccaacagaacaaaaaggcaacttatggaatgggaaaatatttgcaaactatatatctgaaaaggggttaatatccaaaaaatataagtaactcctacaactcaagagccaaaaaaactaattacccaataaaaaatgggcaaaagagctgaacagacattttttccaaagagaatataaaaatggccattaggtacatgaaaaggtgctcaatatcactaatcaccaggaaaacgcaaatcaacaacataatatgatctcacatctattaggatgaccactaaagaaaaaaaaggacaagcaatgtctaggatgtggagaaaagggaactgttgtacaatgttggtcagaatatgaattagtgcagccactatggaaacagtacggaggttcctcaaaaattaaaaataggccgggcgcagtggctcacacctgtaatcccagcactttgggaggccgaggtgggcagatcatgagatcagaagttcaagaccagcctggccaacatggtgaaacctcatctctattaaaaacataaaaattagccagacgtggtggtgggcgcctgtaatcccagctactcaggaggctgagacaggggaattgtttgaaccggggaggcagcagttgcagtgagccaagattgtgccactgcattccagcctgggcaacagaggaagactccatctcaggaaaaaataaaaataaaatgaccggctgggtgcagtggctcacgcctgtaatcccagcacttcagaaggccaaggcggatggatcacacggtcaggagattgagaccatcctggctaacatggtgaaaccccgtctctactaaaaacacaaaaaattagccaggcatggtggcgggcgcctgtagtcctagctacttgggaggctgaggcaggagaatggcgggaacccaggaggcggagcttgcagtgagccaagatcgcgccactgcactccagcctgggtgacagagcgagactccgtcccaaaaaaaaagcgaccatgatctagtaattccacttctgggtatatatccaaaagaattaaaatcaggatcttgaagagagataggtacttccatatctattgcagctttattcttaatagccaagtcatggctaaatatccatcaaggaatgactgaataaagaaaatgtacacacacacacacacacacacacacacacacacacacacacactcacacacacgaatattattcagcctttaaaaagaaggaaatcctatttgctatagactacctgaatgaaaatggagtatgttatgtaagtgaaataggccacacagagaacaaatacatgactccacttatatgaggaactgaaaacagtaaaactcatagaaacagagaatagaatggtggttgctaggtgctgagtggggaaatggtgaggtagtaatcagtttcagttacacaagatgaaaaagtcttagagatctcctgaataacacagtgcttatagttaatcctgtattgtatacttaaaaatttgttaagacagtagttcttaggttgtattcttataaaaatatgaaataataaagacagcaagaaaaaaactttctgaggcaatggatatgtttatgacagattgtagtggtggtgtcagaggtatatactgatctccaaactcatcaaattgtatacattacatatgtataggtttttatgtcaatcatacctcaataaggaagttaaaattcatttaaaactgaatttttcagttttccttttattgatttccagtttcactcgattgtggtgtgagaatagttttataagttgtagctttttaaaatgtattgagacttgttctgtggcctgacatgtggtccatcctggagaatatgctatgtgcactagacaagagtgcagattccgtttttgctgggtgcagttttctttccgtgcttgtttggtgtagtttacagcagcagtgtccaaccttttggcttccctgggccacactggaagaggaagaattgttttgggccacacataaaatacactaacactaatgacagctgatgaccttaaaaaaaaaaaaatcacaaaaaaatctcatgttttaagaaagtttaaaaatttgtgttgtgtcacattcaaagccatcctgagccacatgcagtctgtggtccgtgggttagataatcttggtttaaagtgttgctcaagccctttatttccttactaatcttctgtctggctgttctatccattattaaacagagagcatagaattctccaactattatagcaggactgtatctccttgtaatttttgttccaaaatatttggggtgttgatatttgatccatattttttatagcagttacatgttcttgatggattaaccccaatatttactgtccttcaacatctctggtatcaatttttgacttaaagtttatttggtctgctatctatgtagctatccagctaggtttaatatttgcatgaaatacctttttacatccttttattatactttccaggctatttgtgtttagctctaaaggaagtcttttataaacattatatagtgaaatcatagttttaaaaaattattcctccaataagtgccttttaaaggagaatttaatccacttatatttaaagtaactactgataaaagaaccacttttaccattttgctacttgtttttcacatgcctatcttttttgttttgtaattattcccttacttgcttctttgtgtgtataagtttgtgtgtgtatatcatttcggttcccttctttacatttttgttattttcttaacggttgccctgggaattaaaatttccatcagaagctgataataattaagtttcaatcgatgctaagttggcttcaattgcataacaacttctgtttctatatagctctggctggttctctttataatgtcaaaaattacttctctatgcattttatagccagtaacagatttacaattactgttttatacatttttaaatcatatagaaaaaaagtttttaaaaaaccagtaatattggcttttgtatttgtacctacgtaggtgttttacctgtattaatttgtttttatggctttaaggtactgctggtgtccttttacttcagcctaaaagactttgcttaacatttcatgcagggtaagtccactaatgcaaactccctcagctcttgtttatctggggatctcaatttcactgtcaattctgaaggataatttgcctgatactgaattcctgctggatagttctttcgtttcaaactttgaatatgtcattccactaatgtctagcctccatagtttctgatgagaatttggctcttaatctttttgagggtcactgtacatgacaaattatttctatgttgctactatcatgattctcttttccttccacagtttgattatgtgtcttgctgtggatctctataagtttatcacaattaaagttcactgagtttcctaggtatacagattcatgttctttatatatttgggaggtttcagttcttatttcttcaaatattctttctgccttttgctttctccttttcttggaaaattcttattaagcatacatacatatgcttcatggtgtcccaaagctttcttatattgtatttttcttccctttcttctgctcagattaaataatttcaattaacctaaagtttaggttagctgattctgtattctgtcactctactcttgaaactttatagttgaaattttcacgttatacttttcagctccaaaacttctatttcacttctttttaataatttctatgtttttactgatattcgttgaaacactgttgtcctactttcctttagttctttgtccaccgtttacttcagctctctaagcatggttaagatagttgatttaaagtattttttagtaagtgtaatgtctgagcttcctcagaagcatcattaagccagtaatcatgcttcaaattgcccaacctggaggaatcctcacacagctgtagtacagttggcctgctcagaggcagccaatgcggattctttgtaatggagaaaaactgtaaacaaccaatgtgtcttcagtaagagaatgctccaatgagaaagtaaaaactcaagctgtctctgtttaccagcaaaaaaccaaaacaaagacatacagtatacaaatatacaattttgcaaaacagaatatcacaacaaaatattcactaaacattttctaaaattaaattatgatttttacgacttctcttccattgaaaagaatgatcagtagttcctgatggagatagtgggtgatggtggactggacaacataatgttttactttttagtccctaagcatcactgcatgacattttatcataaaaaatatatatatcatgtgatgtttactacaaaagaaatgtagtatttaacaagtagtgtaatcagaatttggctcctgcctctctgatgacagaaagttctgctcacaggtcttagctatattatagccatcttttggctattattttttaattattattattatttttttgagatggagttttgctcttgttgctcaggctggagtgcaacggcacaatcttagttcactgcaacctctgcctcccgggttcaagcgattctcctgcctcagcctctcgagtagctgggattacaggcacgtgccaccatgcccagctaattttgtatttttagtagagacgggatttcaccatgttggtcaggctggtctcgaactcctgacctcaggtgatccacccgtctcagcctcccaaagtgctgggattacaggtgtgagccactgcacccagccccttttagctattattaaaaagtcaaaaaaataacagatgctggtgaggttgtggagaaaaaggaacacttacacaccattggtggaagtgtaaattagttcaaccatcctggaagacagtgtggtgattcctcaaagatcgaaaaacagaattaccattcaacccagcaatcccatcatgcgtgcatgaacatacacatacgtgcatatgttcactgcagcactagtcacaatagcgaagacatggaatcaacctaaatgcccaccaatggtggactgaataaagaaaatgtggtacacatacaccacggaatactatgtagccataaaaaaagagatcatgtcctctgcagggacatggacagagcttgagcccactatctttagcaaactaacacaggaacagaaaactaaatgctgcatgttctcacaagtgggagctaaattatgagaacacatggacacatagagggaaacaacacacactggagcctatcagggatggagggtgggaggagggagaggatcaggaaaaataactaatgggtacgaggtttaatatctggatgatgaaataatctgtccaacaaactcccatgacacaagtttagctatataacaaacctacccctggactaaaattaagaaaaataataaattacagacatttttatctaaacacccactgcatgagaattcccaaatgaacaggagagtcttcatgagatggatgcactgtgaagaatttaaagaacctcctgctgttaagacaactatgttgatttaatattttaaaaccaattatgaaaaaagactaccttctccatccccaatgtctacttctgaacttcccattctatttcaaattaatattttagagccagaaacacactgattcaattgtttagctacaaatgtattataaactcaagctaagcaagtttcccccaacagtcttctttttcaaagttttccaggtatttgtgcacattaatatatcacttccatatgcagcttctttaatcctggtttataaagagatgaaagggtatccaaatgaagtctctaaacagtcactaccacccaacctcactgacaccatggagcctgccccccatacccaatccatgcctaggcataaaaccctttccagaacaatcatctaaacggagccttttccaaagttccgtgttaccgggtcacagtgagatggaatctatgtggagatggaattgagggaaagccctgggtgtgaatatacatattagtcaggacacttcagagtcagataaaattagcaagtccaaaatatggcatttcaggaaggagaggacaaaacagtgaaccaagaatataacttttacctgagaaagagccattccctcctcttctttctttcctcttcctctgagtttctttctcaggtaagtcagtctgtatgtcaaaaatatgttgtttaatgcttaaaatcaacacaccccctgcctctaccacacacacacaggaagaggcttgatatagaaaaaagatggtccttagcttccaattgcaacaagagtgaaaataaactcatgaaaaaaattaactcctaaacagagactaaggagttattccacctatgtcttcaaaaagttctcccttcttgctgaaacccacacattctgcatcaattgcattgtcctttgtccacctgacactcagccaagaaaaactgttgtgtccaagttcatggccagtatccaatgactgtcagtcaatgcaggatataaaagcctaaaattggaacaggtgaagagccaccatagctccacgaatccctgctgtagccatactaagtagtttagacttttgtcccacaggcagggggaaagcataaaaagatataacgccaggagatgacataataaaacttaagacttacttctgatgtagagatagggagaaagaataaaaagctgagagagaagcagctctcctatctctaaccctatgccccgacccctttcctagtagtttccatcatttttggaggtctcagagtcatttaagactaactgtaactgggcaccctctctcaaaaaattgccacatgcagacacatgctcaatcctgaaaatcatttcagggatcccatcggctcagattcagaatttctggtatacccatcatctccacgttacaggtgggcacactgagcctcagagagaggagatatttcaccaagttacctggaaaaggtctgagttgagtgagcagaactcagttgtaaatgaatgttgaaatggtggcctggatagggcagtagcaaaggtttgtccttatttccagatcaccattcacattcctgagtagaaacttctatttcatgggtttaattgatcccaaggatttaactcttttccagaaaaatattcaaaaatatgaaattacaaatagctattactcttggaaagcatgaaagggggtcagctgtggagattagtgctgagtaatctcttcattatgaacagacgggctctgttggaacaaaattccacaccaatccaggccattcttcaacatcttgcagagaaaggacaaaggggacctggaggaacatctacttagtgggaggcttttagatgacataagggagtaaagaaactgaatacagctgagccttgagcaacaccagtagtgatggggtgctaatcgcaccccacctccagtcaaaaatccaggtataacttttgatttcccaaaaacttaactactgataacccattgttgaccagaagtctactgaaaacataaacagttgattaacacatattttgtatgttacatgtattatatactgtattcttataaaaaagtaagctagagaaaagataatgtgattaagaaaatcataaagaagggaaaatatatttaccattcattaagaagaagtggatcatcacagttcatcttcctcgcatcctccccgaggtcatattgtgtgggctgcagtggaaaaggaagagaagaggttcattttgctgtgtcaggagtggcaggggtagaagaaaatcccctgtatagttgtacctgcttagctcaaactggtgttgttcaaggtcaactgtattaaactaactggttaaaccagattttaagtggtaaaagattatcaacaccttagagtgaaacactgtgaaatcaagtaccagacataaaagaatagttccaatatatgataaaaagtagaaagcatttaggccaggcgcggtggctcacgcctgtaatcccagtgctttgagaggcggagacagatcacctgaggtcaggagttcgagaccagcctggctaacaaggtgaaaatcccgtctctgctaaaaatacaaattcaccgggcatggtggcgcatgcctttaatcccagccactcgggaggctaaggcaggagaatcgcttgaaccctggaggcggaggttgcagtgagccgagatcaagccactgcactccagcctgggtgacagagtgagactccgtctcaaaaaaataaataaataaataaaagaaagcaaaagaaagcatttaaacctcataagctgaacaatacatttaagagaaaatactttgaaaattttttttaaatccaataaattatggaattacatttaagacaagttgaatacacgtcaaatttagaaaatgacacaagccacacacaaaaaaggagggaataatattgttaatgtctgtttgcaaaagcagcatacggtgtcacagtttcttcccatttcttgactctcctcaagatcagagaaagggaagagggtgagctggaattaactgagctaagtcagttaaccctctggctgaataagggttgcttctgatgtaataattagaaaacgcagaagcctcacaccgtagttttgcaattttcatgctcttctgcacaaacaatgaagcaaattttaaattaattatagagccatacatcagtacttcacaacttaatgttccatattaaatcaatccacactcacatggatttgggtgcccccccctttctccaccattatgtgatttttttccccctctctataaatgtttctcttccaccttctgtttctttccttttctttttcccatttcggcgttttcctgtccctttctgctcatttggcttcccttcctctccttctctgacagagtgtttggccccatcctggtagcatcctttttttcagtccctgctattgtttctgatggctctctaatttcgcgcatttctccctctttatcctccatttctgcttcccctctgttctccctggagaagggcgaagggtgtgtatccaccccgagtgagggctttaccagggggagggaagagggagtcagagaagagttttaagcagagaaacgacgcggtgggcggtcggtgtccacactgacctaaagcaaaaaggtcggggccagtacccacttcagaacgattttaatccgaaatggacgcagatctctagaccctctcggagcgacgggactgggaacgtcttagggccacgccgcgagaggaatgagcaggttcggggttttaacctacagggcgaccccaaaacccgacagcggagcgtgggaacctgtggcccgcgaggcgcaggcttgaacccgaaagacggagactcacccgagagcgccagtagccccgcgagatccgcttccgggtcggcaggaacctgcgcgtacgcgagtgcactggggcggcgcaaggggcaagggcaggggcagggcgcggacaactgtggggatgggcgggcaaatggcggggatgggcggggacaatggcgggatgggcggggacaatggcgggatgggcggggcctaggggtcggactgccggacctctcctcggcgcgtcccagcgacttttttaggcctgtttgtcgcccagcagtactcgattcttcacttttggattcccttgaatctctatggtgtcctttggagcctagctaagtaaaaaattagagacctgtgggccccttatattggaatcggagcttaagatgggaaaggtttgcttgaaaacgtttctgcgagcgatggaggcgcgtcctgcgacgaggcgggaggagcgctgggacctggtggatgggagagggcgacggtataaggaagctcttggatccaggaacttctgaaatccggacgattaaaatttgtatttaattaagcgaaagctggagttgtctgcgtaggtgatggaaactggaatgagatgcatttttgtgcctgtgcggagtgtacaattttatattgactttcactggaacgtaatttttatttccgctccccagtcacccaggaggcagagatgcaccatgggctgagttccagagaatttatggggtcagaccctgggcggtggggggtggaaggctgaggcttggctttaaaagaacgcaaagttctgcttgtatcgatctaaatttattttcctttattatcctaatgcacatttcttgagataaattacaaatccaagtgctggatttattggagttggtatgttgtgttttgtctaagttattaattactaatatactatcgttattattatttttattattattttgagatggagtctctgtttcccaggctggattgtaatggcgcgatctcggctcacggcaacctacgcctcctgggtcaagcgattttcctgcctcagcctcccgagtacctgggactacaggcgtgtgccaccatgcctggctaatttttgcatttttagtagagacggggtttcaccacgttagccaggttggtctgggacccctgagctcatgtgatccgcccacctgggcctcatgaagtgctggggttataggcgtgagccaccgctcctggcctttagtctgtaaagtctttattctcagttatttggaagagtatttttaacataatatgtgcttggcaattctcctggccaactgaattgatttctcttgggcccagagaggaaacttattgactggaggctccccaagagaagatgagcccatatgggggtatctgagtaaaccaaggtctatccactgtctctttgggtctctgttttcgtaactgggaattacatctgataacaggtgaagggtgaaaaaaaaatgagagtgcattttagcataaaaatacatatatgttatttacatataaacatacacatataaaaattctatttattttacatataaaaatacatatatgtatttaaattttttttttttgagacggagtctcacccgtacagacggggtttcaccgtattagctacgatgtctcgatcttttgaccttgtgacccacccatcttggcctcccaaagtgctgggattacaggtgtgagccacagcgcccagcctctttctcttttcaatgtattaaatgcacaagattccatactttcaaattccattttgcagaattattatattttcataggtttcccaaatcaaatattaattcaagtttcagttagttgttttaaaataataaatatatagttacataatctttaaaatgattcgttttctagcctaaaatgctttatcaccttttatgtttcatgtctcatattttagtgcacactctacctaatgttgtacattaatttccgtgatgggtgccgtagtatttttagtctttgcagacagtgaaatgagtgtttctgctggtatcttaacatctactcacattaaatacattgggtcatatgaaattatttagtgcctattataacttatcaagacctatgaatattcactcataagttatattgatatgtagaataaatactttgacaaaaataggaaattatcaaaccaaatttataaagtgaacatgacaaatatttatacatatgtaggtgtgcgtgtatgtatgtgtgtgtgtatatgtatatatatgtgtgtatagatatataaaggacacaactaggcaactattatagcgtagtagtgaacaccaatgttactgcaaccaggctactcacgttcaaatcttcactcttctggtatttaaatgagtcacctaatctccttgtgcttaaactcttttagagttggtgaaaggagaataatatgaattcctacctcatggagttgtgaatattaaatgtcagaataggtacagcatttataaaagtcactcatacattgtaggtgctgtaaaaagaaatacacgaaatgggaaatttgttaacaatatatctctctatatatttcacttttaatattcagggggaagaaatcgtcataagtgaaaggttattttccatgaaaatgtggcccacaactcgtgttgccatgcagaaccttctgcttactcaatattgagtgctggaaaatgacagaatggcctctgtggacctgaaaattggaatgatcttcctatttgtgggcagcaagccacccagctgccgaggcaagagaccgagggcacgagctgttccagcataataaaatatataaaacaacaagagttatattagatctagatcatagacatgattatatatgaatatcattaatcattagttggtagcaattactcttattccaatattataataatcctcgctctataatcataacctaggaaaagccaggccatacagagataggagctgaggagacatagtgaaaagtgaccagaagacaagagcgcgagccttctgttacgcccagacagggccaccagagggctccttggtctaggggtaacgccagcgtgtgggaagacgcccgttgccaagtggaccgtggtctagcggtagcgttagtgtcagggaaaaacacccgctatttagcagaccgggaaagggagtctccctttccctgggggagtttagagaagactctactcctccacctcttgtggagggcctgactcagtaccacctgcagttatccagaggcctgtctccctgtgatgctgtgcttcagtggtcacgctcctggtctgccttcatgttccatcttgtacacctggctctgccttctagatagcagtagtaaaattagtgaaagtactaaaagtctctgatatgcaaaaataatggcataagctgtctctctctctccctctctctctctctgccttggctgccaggcagggaagggccccctgtccagtggacacgtgacccacgtgaccttacctatcattggagatgactcacactctttaccctaccccttttgctttgtatccaataaatatcagcgcagcctggcatttggggccactaccagtctcctgctttgtatccaataaatatcagtgcagcctggcattcggggccactaccggtctccgcgtcttggtggtagtggtcccccagacacagctgtcttttctttcatctctttgtcttgtgtctttatttctacactctcttgtctctgcacacggagagaaacccaccaaacctgtggggctggaccctacactattccaggtagttgttggaatcctggggaatttttcactcttatattattatatgttcctttactttaggggatacaagccaagatccacagatttgattctcaggcacctgactgtagctgactccttggttatcctatctaaaagaatcccagagaccatggcaacttttgggttgaaacattttgacaattattttggatgcaaatttcttttgtatgcacacagggtaggcaggggtgtgtccattggaagcacctgcctcttgagtgtcttccaggtgatcaccatcaaccctaggaactccaggtgggcagagatgaaagtaaaagccccgacatacattggtctctccaatatcctgtgctgggccttccacatgctggtaaatgccatttttcctatttatacaactggcaaatggagcaacaacaacatcacaaagaaaggagatttgggatattgttctgccccacttagtgatgaagtcacaaagtcagtatatgcagcattgacatccttccatgatgttttgtgtctggggctcatgctctgggccagcagctccatcgttttggtcttgtacaggcacaaacagcaggtacaacacatctgtaggaacaatctctaccccaactcttctcctgggaacagagccatccaaagcatccttgcattggtgagcacctttgcattatgttacgccctttccttcatcacctacgtttatttagctctcttcgataattccagttggtggctagtgaacactgctgcactaatcattgcctgttttccaactattagcccttttgttctcatgtgccgtgaccccagcagatccaggctctgcagtatctgctgcagaagaaatagacgattctttcatgatttcaggaaaatgtgaattggctgtcttggtttatgttcggccactgatgcactcagacctcaagggatcttaagaatgattatcagccaatttcactgcagagagaggggtgaataagacagagacttatccaatgtgaaatactaaataataatagccatagtaaatgaaatcttatgtaattaacatgtgagtacttatatagttgtattttttattaatgattgcagtgaagaacttcagattccataaaatagtcctgaaataatgtatagatactgaaagcatctttaaatgtgtgatgtccaatctgagatattaaattttcctaagacgtactagagcttggaattgtataaatgggcatagcagttgcctaaatgggcatagcatgtgggtggttgttatggtttggatatttgacctcttgaaatctcattttgaaattgtgccttacatcccataaaaaaactgtggacatttgaaatatgataatgtttattgagaaagattagtatattaaaatatttccaggtaaacatttgaagaatgatccataagagacaaaaaggaatatagggagctgtgtcagctcacttttacaaagggtgcagatggggccaggcatggtggctcacacctgtaatcccagcactttgggaggctcaggtgggcggatcacctgaagtcaggagttcaagaccagcctggccaacatggcaaaaccctgtctgtactaaaatacaaaatttagcctggcatgatggcgggcacctgtaaacccagctattcgcaaggctaaggcaggagaatcacttgaacccaggaggtggaggttgcagtgagccaagatcgtaccactgcaccccagcctgggtgacagagtgagactgtctcaaaaacaaacaaagggtgcacataggagacaacaagtaaatagagatttggcaggtgggaaagaaattgaatggatttttgagatattcaaaaggtagattgttctgggtaagccttgatagagctggctatagtggcaagaagtaggtttcaggatggactttttcatttccaacttgagacaagtttttggaataaacttcctcagccttggagcagcagatgaatacaatttggagccaaaatacatgaatttgttttgtttaatgcagaactttttttttttttttttttttttttgagacagagtctccctgttacccaggctggagtgtagtggcacgatctcagctcgctgaggcaggcaacctttgcttcctgggttcaagtgattctcttgcctcagcctcccgaatagctgggattataggtgcgcaccaccatgcctggctaatttttgtatttttagtagagacagggtttcaccatgttggccaggctgctctcaaacccctgacctcaagtgatccgcccgccaaggcctcccaaagtgctgggattacaggtgtgagccactgtgtctggcctaatgcagagttttatattgattttgaagtcaccaagaaagcaaaatgaacaccttcaaaagaaataaaaaggataaggccgggcgcggtggctcacacctgtaatcccagcactttgggaggccaagcgggtggagcacaaggtcaggagattgagaccatcctggctaacacggtgaaacccactctctactaaaaatacaaaaaattagccaggcatggtggcaggcgcctgtagtcccagctagtggggaggctgagacaggagaatggcgtgaacccgggaggcggagcttgcagtgagtggagatcgcgccactgcactccagcctgggcaacacagcgagactccctctcaaaaaataataaaaaggatattaattcaaacataggaaatattttaatatgatcctctgtaaattataaacggttataattttttaaattaaacattttattgtagaataattgtagatctgaagaaaatttgcaagtataacacagagagttctgaaatatccgtcacccagtgtccctcatgtaaacatgttgccatgaaacatttgtcaagactaggaaatgaacgttggttcattcctcttaactgactttatttatatttcaccggttttaacacagtctttcttctctttcagggtccagtccaggacatcacattacgtttagtcatcttgcctccccagcccgttttgctctgtgtttttgtttttcatgatcttgacaactttgaagagcattgttttacttttagaatgtcgctaaaattgaatttgtctgttgtttatctcatggatagactagttttatgggttttggggaagaaaaccacacttgtcacatcatatactgtcagaagtctaaggaaatttggatgagttatctctggtgatgttaatcttgatcagttagttaagatagtgtttgtcaagtttcttcactatatggttactgtgttttcctttccacactctaatctttggaagggagtttctaagcccatcacacacacttaaagtgagtatgtgtgtttgtgtgaaaggggcattgaattaaccttcacctgctgggaggtatccacatagattatttgccatccttctgtaaggaagatatgtcttttctccttcatttatttgtttgttcaattatttattcatatcaacatgaactcattgatatttatattttgttatataattcaatgctaaggaattaattttgttacttaagtttttgcagctttggtcactggaagttgtggaataataaaaaatatatatctggtcttcatcctggttcctgttacagagcttcaaaatctttttttttttttttgaggtgaagttttgctctgttgcccaggctggagtgccgtggcgtgatctcggctcactgcaacctccaccttccgggttcaagcaattcccctgcctcagcctcccaagtagctgggattacaggtgcacagcaccacgcctggctaatttttgtatttttagtagagacggggttttgccatgttggccagcctggtcttaaactctggacctccggcgatccacctgccatggcctcccgaagtgctgggattacaggtgtgagccaccgcgactggcctagagcttcataatctttttgaatttcctgaatgatgaatgcctttgtcatattcacgagatgactcgtggcacgggtccctacatagctttacaatgaggactggtcaccagaaagaccaattatgtaattagaagaactttcagccaccagaccactggaaagggaagaggctagagattgagttcaagctcatggccgttgaattaatcaaccatgcctaggtaattaaactctgataaaaaattcagacatgaaagcttgggggagctttctggcatgggacaaaccacataatagaaaataaaattgcaaagtaaactaataaagtcttcaaaaaagaggttatcactcaaagtcttctcttctagctatcttgaaatatacatgacattgtgatttgctatagtcatctcactgtgtagtagaaactattcttcttggctaattaactttgtaccaattgatgaacatctcccagcagcagtcccccaccccttccctcctgggcctctggtaaccactattctaccctctacttctatgaaatcaacttttttagatttcacatgagtgagatcatgcagtatttgtctttctatgtctggcttatttcagtaacataatgtcctccaagttcatgcatgttgccacaaatgacaggattttattttgttttatggctgaatagtatttcattgtgtatatataccacatttctttatttgttcatctttgtatgagcatttaggttgatttcatatctggactattgtgaatagtgctgcaataaacatgggactgtagatatctctttgacatactgatttcatttcctttgcacgtatatccagtaagaagattgctggattacatggtagttctatttttaattttttgaagaatctccaaactgctttccataatggcttcactaatttgcattcctaacactacaaagaaatgataaatgtttaaagcaattaacatggtaattaccagcatatgattattatacaatgtatacatgtattgaaacatcacataataccccataaatatgtactattattatgtgtcaattacaaattaaaaattagtgaaaaaaggggttaccaaatgtctaataaacaaagaaaatatgctcaattgccttagtattcagggaaataaacataaaaccgctaactagtactcaaatacactaaccagaaggctaaaatgaaaatgacagaatataccaagggttgaccatgacgtgaataaactaatgatctcacactgctgagggttgtgaaaattggtgtaaacctgttggaaaactatttgtcagtgtctgaaacagcttaacagacacaaaattatgttaagtagaacttaacaattctactactgtatatatacatatctctctcaaataaactcatacgtgtgtcaccaaaccacaagagagatatatatatatatatatctcaaataaattcatacatgtgtcaccaaaacacaagttctagaatgtatataccagcattattcataatagccccaaactgaaaactactcacatgtacatcgagaatggaatgattaagttaatagatatttacacaatggaattctatgcagcaatgctagtgaatgatccacaaccacctgcaaaaatacagacatattcacaaacaacatatacaatacaagatgccagatacagaataggttattttgtatgattccacttacaggaagtgcaaaacacatcaaagtgatcgatgctatgagatgtctgaatagtgctgaatccttgggagtcatgacaggaaggagtgcatggggacaccttgggttccaggaatagcctgttttttcatctagaagatgcataggagatgcgttcaggttttaaaatttcatagagctgtgcacatttacacagctgggagatggtacataggttacaatttagagaactgggagatggtaaataggttagggttttaatgtgccaatattgccaaggtgaaagttaaaggtcttacataactttatgattattttatagaagtaatttcaaaatgtaaaacgaagatagtgagtacaaaaccttctaaacaaaagtgcaaaatgtagaattgctttaaaaatgttttaaaaacacagaagttaaaatagaaagaataagaaaatagggaaagtgtaaagaacacagaataaattggtaaacataatcctgaatatatccattattacattaaactgaaacagacaaataatttttgttatagtaacattgtttgactataattaattgaatattttagacagatacataaaacattacgaaaaatatacaataacgaaaaatacattctatgtaattttaaccaattaaacaactagcatggctatgtaaataacacatgaaatagacttcatagttggtttaacttgtcactattataattaatatttttctacatttcttaatgtaaacatttctaatattccttggtagatagcaaacataatgccacttactataaacatacacacaggtatgttccatcttgctttgtgatctaatgtgcagtacataatcctaagtgcctcatacaagttaaaaatgtttccttattttcgttcatgaagttcaatacgttaagtcaaacgaattcttttgttcgatgaactattgaatctttaatactttgcatcagcttcataatgaaaataaagactcagtatgttagattgtttcttataattggggcataagcattttgctcctttggaagtctacctgtcataatctccacacgaacacagtggattcatactttctccctcaatatagccatttctctgctatttcaagtaaatttgaaggaaatgaatgtctgtgctcacttgctcaccttagaggtaggaaaacgcaacccccaaatctctttctttccaacatggccaactggcatcttcacatgataaagaaaaagagtctaccatctactcgtctagatcctcaaatctatgcagtctcacagagtgtgtgtggttttctgttgttgttattgttgttgtttgtttgtttgctttgaggccgggtctcactcccttagcccaggctggagtgcagtggcgcgatctcggctcactgcaagctctacttcctgggcttcaagtgattcttccatctcagcctcccaagtacctgggtctacaggcatgtgctaccatgcctaggtaatttttttcatatttttagtagagatgaggttccgacacgttgcccaggatggtctcgaactgctgggctcaagccatcctcccgccttggcctcccagaatgctgggactacaggcatgagccagcacgcccagtcagcatctgctttttaatagtcagcattcacaggatgtttttaattttggcataaatatatttttttgtctcattcttgatcagtgtaaccatttctacatgaaaatgatttaaatatactgatttccctccatatagttatattttaaattactattatctgtctgaggatgtaacgtacagattttataacttgggacccaaatctggaattaaccaaaacctcgcctccaagcaacctcattacttcaggagaacatttttttcttcactttcctgaatggtcatatcacacactgctacttgtcatgtaactttttcaacaatctcacgcttacttaatttctgcatagatttattatatcagatcgaaggttgcacactcaaagagatccccatcattgccagattgattcaggacctaatttttttaattgcgtagacctttaatgactctactgcaggccttaataaaactttgataatatgaatatttacataataattgcatcatatttcatttacaattgttcttactagttattgtttatcattggggtggaagttcaccctgtcttgttcatcaccttctcataattgggagaggttcataattaagattacattgcggcacagaagagtaagtcatcaattgaaccatgagcaaatatatacaatgtacatgtttatgatgaggttaggagatcttgtcatcttttccaggcaaaacaaaacctgtatacactggggtcacagctcatgagaacaaaggggctgagagttgggaaacatacactcattaaggctgaagtgttcaccagtaaactattgggattatccaaaagagccatacaaacttggaaaaggcaggagagagtgtaagaagacacaaaggtgctcaccaggatgaggatgctctgcgtagctctgttctctggggaggctctgggggagagattgctcctatcaatgtgctggacccgctgcttgtgcctgtgcagtatgcaaaccatggagctgctgacccagagcatgagccccagacacaacacatcagggaatgataacaacattgcacgcagtgtctgtgcgattttgttgttgcctcccccagaacagtatcccaaatcctcgttcactgtgatgtttgtgtagttccatttgccagtcacatacatgggaaagatgatgtttaccaacatgcacacgatccagcacaggagaacagaaaagccaacatgcttgggggctttctctttaagttttgcccacctggatttcctggagctgaccgtgatcacctggaagacactcaagaggcaggtggtgccaatggacactcccctgcccactctatggagatagaaaacaagtttgcacccaagagcattgagaaaatatctaaccccaaaagctgccattgtctgggggactcctttacagcggagagctaagaagttggctacaatcaggtgcttaacaatcaaatctgtggaccttaacctgcacccagtgcagtaaaaggagagataatggagaagaacagagaagctccccaggactcccaccacggtctgtgataagatcattcccactgccacataccgggaggccattctgccactgatgtctgtcactgatgtttgtcttcagggctgggaggtcctgcatggaaataggaggcatgagctacgtttatagtgtcacctgcaacccagcattctccacctcccattgctctgcccttagaaatacttaaagtcactcttctcttaagaggcttttgagagttgaatgcgtaacctttaaagagcacttcccatgtgggaatcactgctgtgcagatcatacgtgcggcaacttctttattcacaaacctatgaggcaggcattactattactttcattgtaaatatgagaaggacatacacacagagaggtgaagtggctggcaacatttccaccctacttacaggcaaaatgcgaacttgaacctgcctggttttattgcaaagacagtgcatttagccgttatagttgactaacaaagctagatagctgtgttctttgaataagacacacacacacacacacacacacacacacacacacacacacatacacacacacacccctttgtttttattccttgtcattatatttcagtcttgtagtaggttactgtatgttgtaatgattttacattatgtgtaaaaatgtattctatttgtcaatatccaaataaataaaggtttagagatcttaaaaaatgtagatgcagggattacagtttgatactatagaaacctgcaccatgacaagttggatttaatgactgcaagcatggatcaatattagaatggaaagagagtaaaaaacattgtgagcatttgcttttgtgccacggacaaaggcataaaggcacctaccacaatcatgtcttacccaaaacaataggacatgaaacaacaatatgggataaaatagtgtaaggtaataaccaaattcttacaaatgttagatgacatatctagatctattaataactgagttaaataaattattatccttaggacaatatttgcataactaaattaaaatgtgacaaacgtgaaaattggaaactctagtgggtgtatattatatatactttgtaaacggaaattagagagtttgggtgatgttagaatctatctgaagcagagaacacatcagaggacacatttgagtctgatagctgctctctttagctcattattataaagttaccttttccttaaatgctgcctccttaacatcaagaggaaagacagtctcaccataatcaacagactatggcagttttcagtagagacacaattaatgctcccattaagccctgcacactctcagaattagagaaaacattttcgttccagcaactactaattagatacactgtttgtgtaaggaattacatgactcctgtagagtcaatctattcattacaagtatggtgatattatagtcatttcctcagcaatcctgaaattttagtgtataattcctgttgggtaggcggaacagcagattgattttagtaccacagtccttaagaatgcaaccagctttcattattacgacagattgatttaagaatgttagtccttaagaacatagtcaggtttcactgttatttggtgaaaaaccaacagtgcgggtcagtgtggattctcctaaatcacatcaggaccgcccaaggattggtgtggggctaggaccccatttctctttagtagctcagctcatggctcacaaccattcctcttttcttggtgacttgggggttagactagttttcttttttttttttttttattgatcattcttgggtgtttctcgcagagggggatttggcagggtcataggacaatggtggagggaaggtcagcagataaacaagtgaacaaaggtctctggttttcctaggcagaggaccctgcggccttccgcagtgtttgtgtccctgggtacttgagattagggagtggtgatgactcttaaggagcatgctgccttcaagcatctgtttaacaaagcacaccttgcaccgcccttaatccatttaaccctgagtggacacagcacatgtttcagagagcacagggttgggggtaaggtcacagatcaacaggatcccaaggcagaagaatttttcttagtacagaacaaaatgaaaagtctcccatgtctacctctttctacacagacacggcaaccatccgatttctcaatcttttcccccacgcttcccccctttctattccacaaaaccgccattgtcatcctggcccgttctcaatgagctgttgggcacacctcccagacggggtggtggccgggcagaggggctcctcacttcccagtaggggcggccgggcagaggcgcccctcaccttctggacggggtggctgccgggcggaggggctcctctcttctcagacggggcggccgggcagaggcgctcctcacttcccagatggggcggcggggcagagacgctccccacatcccagacgatgggcggccgggcagagacgctcctcacttcctagatgtgatggcggccgggaagacacgctcctcacttcccagactgggcagccaggcagaggggctcctcacatcccagacgatgggcggccaggcagagacgctcctcacttcccagacggggtggcggccgggcagaggctgcaatctcggctctttgggaggccaaggcaggcggctgggaggtggaggttgtagcgagccgagatcacgccactgcactccagcctgggcaccattgagcactgagtgaacgcgactccgtctgcaatcccggcacctcgggaggccgaggctggcggatcactcgcggctaggagctggagaccagcctggccatcacagcgaaaccccgtctccaccaaaaaaatatgaaaaccagtcaggcgtggcggcgcgcacctgcaattgcaggcactcggcaggctgaggcaggagaatcaggcagggaggttgcagtgagccgagatggcagcagtacagtccagcttcggctcggcatcagagggagaccgtggaaagagagggagagggagaccgtggggagagggagaccatggggagagggagagggagagggagagggagagggagagggagagggagagggagagggagagggagagggactagttttcaatctagaacaatttcttattataataggataacttaccctggctcctgggaggcacccttccctacagactgaaacagaaactttctccccagctccatcttgctgctaggacggtgggctcagtgcgaaggttgccacagccaggatcatgtgggagggaagcagccagaccctgagatatgggtttgtggttctgtgacctcacctcccctcagaactgcaattatcttttcacctgcagtggcaacgacagtgcagccttggggagctgagaacgtttcagaacaacttttcttcccaattgctaatcaccaaaagcaatgacaagtttctggccagcatctcttcagagactatgaggagtgtttgggagaggctctttcgtctccattccctggagagacacagtcttacatggagggagcaggaaacgctgagttctgacctgtggcacactcacagtgagggacgagtgtccccggatactctgctttgctgggaggttctgccccaaagcgagctctttcctaatcttcatgccactcagctgcagcatcattagattatgtgcagagaagtgaacccagacagagtgcctgagaaggattttcaaagggatacaagtaaaaggacaaacaggatgccaacggctcaatgccaattaatttggaatctagatgatgtggatcaggtggctaaaaagtcacgctttgatcaatcctgggaagcaaatactgcttactagattcaagagcattggatggttgccacagtcctctacatttgtatgtgtgtgtgtgtttctgaatgttcagtaatgatcactgattgctcttgtaataaattaagaaatataaaatgtgaattcaagttaatcttttgggttttcctacaaacaaatgttattcaggccctccattcaatgcatctcagtttccatgtcagggattagagccataaggtgaacaacccctaccgtacacaaagacgtatattcacacatagatgtacacacacaggtgcaaacacatgcatacgtgcacagcagcacaaatcaaaggaacatcacatacatatacacagctagacactcgccctcacatacatattccaccacaggctcacacccacccacacacctatcacaaacccacactcatattcaaatacactcactatgcccagcactcacacagactcacacagtcccactgacctttaaacaccacactcgcagagtcagcacacgcatttgtatcttgataccaggttcctatctggagaatagcggcggtcatgcctctattgtgattcagcctttatacttcttctcactttgcaccactcatgatgatgacgtcaccatgtgcaatgtataaaatgatgtgcacgttgctaatttggtccaaggcattaagtagaaaagttggagtactggggtcgatattgcatgggtgtgtgacagagggtctgatattgcgtgggtgtgtgacagagtgtgacattgcacaggtttgtgacatagggtaaatctgggggctcatggaaaggacgctattgaggcagagcacctgtaaatgtagattgacggtgaacaggagacagagcacagaggcttaaaagggacaaggaggttaatttccagacagtggaagatgccgtaggttttaagggtgcacaggggaaaagcgtgcaaggagctaagcatatgggggatactaggtgctgtgaggacaaggggtgccagagtcatggaatgaaaggagacgatggggaggtagagataatgagggaaagtgggtaaacagcaggacagggttcaagacaccggcgacttgatgtcaatggaaggttaaagaaaatgaggggaagggaagtaacaggtggggtgcacaggtcctgggagtggtcagtgacccaaagtggagacggggatgggaatggtggaaggaactacgtatatgtcgtaggcctgggaggaaaatgagagcagggtgatgagaggaactggaagggtcatgggaatgagcagccaatgggtttgggggaagagggcagggactagagagttctgggagaagggttggagggctggggaagctgaggacatcgggaggttgattgctgggacatttgaaggagaagggcatggagattatggaatatgggctgagatcattggaatgtggattgatttagggcttaggagaaggaggacatggaaggtggagagtgtgggggcagtgggaggtggggagggcttgcctgacttccccacaatggatgatacagaggtgctggaggcatggaggccaagaagggcatgagatagcggtggggtccaacgtagaagtctaaagctgtcaggaggatgggggagtggattgatgtggaggcccgggtggtgactaagggtcataatggtggtgagagggaggccacaggggagatgaaggaggagggaggaactacatggaggttggggtcgtggaaggcactggggaagattggaggtcactaattcattctccattcatcatctctctcatttacagtggactcacaactgagtcatggatagactctagttccagttcgtgaagagcaaattatgattctgtaaaacacccccaagaatgcttaaaagttaacatgcagtagagggccacagggagcatctgggatgtgcaacatgccacagcattttctcttctccttcaggacaccaggtacagaatgtgactgcagtgggtccggcaggagaggctgtttcctggcacctggtgctcagtgatagaaggaggtgtcagaaggccccttcctgcttctgtggatgtcttgagtttattttgtgtcccaaattcaaaagtatgagcttcttttatttattgtggtatttccaaaatatggcacatgcatattaatagcatatagtaatatgccattaaaatatagcatattaagaaaataaaatacagaattcaacatttgagcactctttccttttgcttttctgtcactggaaaccatcacaagaggtgaagagtggtaatcattttgttgatacattgagaatattttttcaataatattttatcatcaaaaaatgcattggctggttctccaacccctggtgttatcgtgtggttatgttaagttccacgtaggcaaaagagactttgtggtataattaacaatcagctgaaatgaacccgggagattatcctggatgatctaggcgagtctaatgtaatcagctgagctcttaaagcagacaaagaagttagagacaccgccaaagaggaagtcatggcttggagggaagagggggatttcacaggctgttgctggctctgaagacgataggcaggtggaaatcatgagaagaaaaggggatttgtcagccacctaaatgatcgtagaagcagagattctcccctgtggaagcagattctctcccaagcttgcagagaaaagcccaggcagctgaccccgggattcagaccttgtgagaccctgagcggaggacacagccaagcactgtgggcttctgacctacggggaaaaaataaatgggtgctgttgtaaggcgctgaatttgtgtaatggtggagtcatgggaaactgataagtacaggatccaatttaatgacaaaatgtttaaacagttaaataaaatgagctataaataccgcagcaaagatacaaggctgatcccaggcataacaattgttaccagtttgagatgtatcctcctttatatattgatagctctataaatacatctctctctatatatagagagagagatacatgtatgaagatcttatatatagacagatatagatctatatcttcatatctatatctaaatgtagagttacagagacatagatctatagagatagacatagatacaaatatagataaatatgtagacacacatatatgtttgcatagatggacatatacatagataggtctatttgtatatatacatacacatatacattataaggcattttgtcttccttcaaaattcatataaatatatgttcatgttggagtcactgttcgtgttgcttcacccagtcagtgatgagtgtggaagatgtttctatacctccttctcggaaacaccgcatcctatttcctggcacgtatgcatgaagcatgtcactgaatcgctcctgtttacccctgtacagagtcgcatgtgcttgtctgtctcctgctgtgaaatgctgcagggagtgtaggtggctgaaaaaacaatacttttatcctgtaattgataatgctgaacgtgagattttatttttgcatggggtcagacagtctgtagtatatgattgtgggaggaagaagtgggtaaagaaatcaataatattttatcattgaaaagaatgcgtgaatatgcactattactgtttgtcaatttaaaaataaattaattaaatataaacagtaggcaccccaaaactttttgaatctattacacatatgcaataaaaagaatgcagtatgattagaaacatcgttttctaagaaaaaaactattttttccatcatcgaaagtactcaacctaagattttatttttgcgtggggtcgaaaggtacatagtacatgcttgagggtggaagaattgggtacagaagtcagctacaggtagttttttgttttaaaagggtatgcgactttttaaaacataaacttaattgacaaataacaactgtacatatttacggagtacattgtgatgctttgatatatgtatatgttgtggaatgatgaagtcaatcagttttatacccattattgacatagctatcacttttttggcaagaacatttgaaattcactctcttagtaattgtgtatatttacagtatgcattattatgaactacagtcatcatccggtgccatagatcttaaaaaattattcctcctttctcactgtgcatgaatttttaagataaatgcagtggaggtcaaaggattaatgcaagcaaagatgtttcagggaagaagttttagcagttctgcttcataaaaatggtaatttaacctgtttcagttttctggacaatatgagcatttggattttttgaaagcaagtgaatttcttattgatggcaaaacaaaacaaaaccatgatgttttcagagagagaacacagcaattgacccaggacaggacatttacctgagaacatgcctttcctatctcctaatccttctcttgctcttccttattcccagagcttcttcctcagatgagattatcttgggaaatcccacgtgaattttgaaaatatgcctttttaacttcgttttctcttccccacaccaccactgcacccacgggcagaaggaacttgaaatggagaaagggcaacctctgcctctgtcctttgtcacaggagaggttcaggaagcctgtgggtgacaaacccacctgaataggccagacagaccccacaccctgatatctctgtgagaattcttgggaacactcctttatcaggtccttccttgcattgctgtaaagaaatacatgaggctcggtcatattaaagaaaagagaatgaacatgctcatggttctgcaggctgtacgggaaatattgcagcatctttctctagggaggcctcaggaagcttttactcatggtggaaggcaaagagggattaggcatttcacatggcaaaagcagggacaagagagtgtggaggcaggtgctggacactgttaaatgaccagatctcatgagaactcacttactctggaaaggacacaaccacaggggaggaggctaaaccattcatgagaaaaccgcccccacaatccaatcatctcccaccaggccccaggtcaaacactggggatgacatttcaataggagatttgggcggggacacacatccaaactatatcaactcccatctcgtctctgcagagaggcaagtcttcactccagccctaattcccaaatgctgcccagacctcaggatctttaaatcctggtgagttgctgagctcctgtccacaccctggagctgtgcctgccttcctgttcccatcagagccactgactctttccaggagctgtccctggaactgagagttggcttcttgcagttctccccatctgacatgggcttttaaaaattccatggatacatggagagtttgggtgacccatcccccatagccacactgcatactctagtccattcctggactcacagtgagccagactgttcttagacctcactcatccttggtcccacaagggccagaatctccagtcctggtttccactgagctccctgccatgggagactgagctgctcatcccctttcgagatacagaatgaaacagcctgggcttatgtatgaacattttaaacatgcagaaaatagtgtatgttgttcaaaatatatagttctaggttaagttaaacaaattatgggacgggcaaacagcaaattatattatttgtttcagatgtacacatgtgtgataaaatgaaagtgctagcaacagaataactaagaaatggagaaagagggagaggtgattagatcagatgtgattgcatcatgattaggttagccagggggagtgactgtggggctctggggcagtataaatgccagcaggagaatggatcttcccctcagtgttctttgctgtcttcatcgcagaagccccactgtgaggagtagagtctgcagagggtccacttacctgagcgactgctagagggaaggaagacaacaggttggtacattacaattttgggacttggtttattcccacaggagaaatagaagagtgagaaaactctgtagtgggtggttttagatgtcgaggtaaagattacttaattgcttaatagtgtttcttaagacagagcctgactcaaaaaacgtttcagaaattgtaatgatcgaaaaaatatatattaagaaaaacaaaaagaagaaaaacaaaaaacaaaacgaaaaaaattaaaaacaaaattttaatgatcatataaagatcaacgtttgcaaggaatgctcacccagcaccctgaattgtgtgggtgctggatgagcagttatggagacctggtgcctttgacggagggcttttaaataagagatttcttcacttatcttttgtatcggtatactcattgacgtttgctaggagctggtaaaaattcagggccctgagcctctatacctagattaagccaagcaagacttaggctgtgagcacccaatctataatggtggtataaagaatggttctacttaaatacgtagttaaaaatgtttctttacctctcaattttggcgatttggattttgaagaggaaagcacactttattctagattttcgaatgtgtttgtccccaatgtagcattccctgatctttttttttttttattttcatggcggtattgtcttctctttttcctaatatgatctatgcagataaattttattatctttctatgggcacccatggtaatgtatcctactactgctttcaaataaagaacacgttttcctgttgtattctatttattttttcatctgctccaacttattgtttgatttgccatttccatcttttcatttttgcaatctcatgtttttctgtctctaagctgtctccatggacctgagcacttcccctaaattttatcttttttcaatcatgttgtggcaaaaaaaagatgcccgactgagaccccaggagagggttctttgttctcacacaggaaggaattccaggcgagttgcagagaacagtgagaagagagagtttactgaaagctactgcattacacagtagggcgacctcagaatgtgaccggaaaatgcaccgtctttttttttccttttaagttgttctgatatagagtcttttccatgtgaagatttaactaagctgtgtctacatgcggtgggctgatagcatgacaatgtttagtatcctgttgatttaaagaaaactctccttgacattccagtgtgtagcttaggaaagcatagctatcattatgttgaaggcatctattgctttggatattgggcatctggacattttgctttcataggagtctgtcttgcaagcattgctaagctgcttcctcagccacagacatcttagaaccagggtggtgactggccaggactgtgccttgctagtttcaagaaggagttgatttctaaatggtgttgccctcactctcctatgttcctgtttccctagcactgtggtcatttagacaaagacatttcccctgaacccaggttttgctttgctcatcagtttggacatgaaagggctttacctgtattttctttgcactttctgatttccacttgaatatcttgtttgaacttaaggactttgattgcagaaatttcagagactgtgcttcatagtttaaaacattcttacaatttataaaatgtaggtatatctaattttgacaaacagggactacagattgataagatatccagttttctaatatattaaattttctttgaggccaattccacgatcaatttttccagatgtttgatggtatactatgagggtctctagaggagggacctgcattgcatacatatcaaacacgctaagtccagtgaacaattcttttaatggatcacctgcttttctcattcacattggtgtcatgtcactggcagaggaaggatgcgtccgtgtagtttgaatgacaggatgtgtgagtttactcctagggacacggtgggcacagcagagagatggggctgactgcatcctgtgcctgggagagtccagggataggaaggaatcagcgtctcattttctaccctccacagggaaagagaatccctcgggcaggaccagcagtgatggaccccaacactctctccatggaacaggggaagcagttcttaaagcagtgcgggatcccacaaagagatgtgagtacaggagctgcggggtcacctgggaggcaggtggaatgggtggagtccaagtcgagggggaaggctgaagcaggctccccgtccatgaccggctcatattcagagtttcacaccctccatacacgggcactgacccattaaaatcgatatgtaattcctcaaagggacatgggaaaatgacaccaccactgccccttagttcccacctgggaacagcagcacttcccaataccctgggctttcactcttggcgccatttgaaggtcatcagccaactcctcaccagctctggagtaaagaactgtgagattgcctttgcatcctcatagcttagctcccacacatgagtgagaacataaggtgtttggttttgcattcgtgacttattcacagagaataatagtctccaatcccatccaggttgctgtgaaggccattaatttcttcctttttatggctgagtagtattccatcgtgtgtgtgtatatatataacagttcctttatccaccggttgattgatgggcatttgggctggttccatatttttgcaattgcgaattgtgctgctgtaaacacgcgtgtacaagtatctttttcacataatgacttctttaaaaaaaagaaaagaaaaaaaaaaccaaaacaccaaaatgtgagcctgcccagcattccctttaaaatctcaggaagatgggagttcctcctctcctctgccaaggcttcctcctgcctgcagaactcaggttgcgtctccattctcctttctctgcattagattgacttgatgacagagaaatgggttgttctcgcctctgtggaggttcttctgcgatttcctctgaagccaggagaggatccgaccgcccgctatgtctcaaataaaaaatgccaaccttcagtggactggcccaccacaatttcacagagacgtggataccaagagaagtggtaagacaagtattagggaataagctagggacagcctgggggactccccaagcactgttttcctgttgtattcctgttgtgggctcaaggtttctgctgaacacgcctggaggcttccgtcttgcgtgtccccccatgacacggccagtgatgtgtgcgaagcctggcgtgaacacgcacatatgtgtcagcatcgcaggatcctcagagggctggtcctcgcttggctttgtgcctgcctctgtgtgaagagtggcgtgtggtcacaggggtctcacgtgaaacgtcacgagtgtccataggttgaatatgaaaactttgcaaagctttgagcttctggttggttttctgagtgagaagctattctatgaaaatagtgggttttctggaactagctggaaaaatatcaatagttgttggctgttcatctcttggctttgacaagtattgtcagagggtttcagctctgaggcactgactgcacacaaaccgagagcccagaaaacttttatgcaaggctgcaaatctcacttcgccctctagaaatcaagcagcctttggtttataaaatctgtgtcctgttctgggagtaggtcaggctgggagagagtcacaaaatagcacaactgggacctgggttcagagaggaccaagttacagtgggcgtgactcagtggccagtgcatccctccatccctacttgggtaaataggggtaggagggacttccgtctggtgtctgtgtaatgttttctctttttcttatgactaggaaatccaaccatcatttaatgaagaagaatgatcggaagttcaaggacctgccacagatggcccgtcattccgtccatcatcaggctcagaggccccccagagccaaaaacccacaggagcagcagaggagacccatggggcagacgactctcccagcagagcaggaggaatccagggtcagtgggggcttgaaaatgttggtaacctatggacaccagagagtgggcttgaacatgggactcgtgattatgacttaagagttcccactggtctcagtctgaccacatcggtcagcctcctgtcttggcagattggcccattcggagtctctgaggagcagcctcattctctgtccagtgtcatgtccagcctggtgtttgccgagtcctcaacaccggttcattatcttcactctcagacacaagcgtccttcctcctgggatccctgttaaacgggctctggggaggacgataatatcttgaatttcctggcaaccaacagcccatgggcgtatgtccccctcctaaaataatccatctccaaaacccaggccttgtgtgaaccttgcaggtgcctgtgattgctgttgactcactgctctgtgtcctcctccacctgcaggtgaaatgcaagaactgcggggcctttgggcactcagccaggagcaagacctgccccattaagaggtggagtggggcccttcctctgcaggccctgggctcacacaaggagaaggagaacctgaaaccagcaaaggcccagctaccctttacgactccagggccctttacgacgaatgacagagaaaaggagcgaagtccaaggtaaggattttgcagggtcaaggaagatccgtgaggtcggcgcctcaggagctggtgtctcccctagtctttctgtgcagccttctctaagcacacaaggaaagctccaaatggaggtggatggaggcccctgccttccagggtccgcactccgagcttattccagcgctgagagtctctagagggcaggggctgtgggagacctggggatgttacccgaggcaggcagagcagttccagggcctgaatgaacttagagaacctggggccatggtgggggtggggggcggagcttcctggaagtggggctgcttctgagatgagagaaggggctgtcttggcaaagttcacagaggcctgaacgcctccctcacccaaagcaagggctagggctgggttccgggagggtgcttggttcccagtcactggtgtgagttggaggatcaggcgggtccagacagtgaacgtgatttcttctgcagtccccagcagcagcagagcgaagctccgacgcagacatttcccagaactccccaagagaaaatgcaggaagcctggaaggagccagcagaagattgtttgttcctgagggtgcgtattcccccggcccctgctctgtttctcctctaggtcccctgattccttcactctgtgcccctcatggatgggggtcatgttaagacctaggctgccctgcaggagaactgcgctacccgaggacttcccatactccagtttccagcttctttttcttcttctctttttttttttgagacggagtctcgctctgtcacccaggctggagtgcagtggtgcgatctcggctcactgcaagctccgcctcccgggttcatgccattctcctgcctcagcctcctgagtagctgggactacaggtgcccgccaccacgctcggctaattttttgtatttttggtagagacggggtttcaccgtgttagccaggatggtctcgatctcctgacctcgtgatccacctgcctcggccttccaaagtgctgggattacaggcgtgagccaccgcgcccggcctcaggttctttatttgaaagttggtttctgtacctttatttgcaagttggccagcaaatgctgctgggcgcatttcagtgcccgtggggagtgactgatcagatgccttcgggatactggctgcagataaggcgtctccttcatttttgtacatgatcttacatctgctttcaaaaggagctgtgccatttccagtctccacattgtgtggggaattgatattcccttgatattaacaatagagaacataaagagttttaattttcatatgtgatagtcgcagcaaacagaatggttggctatctttccccaacactattcctgaagtgacaattctgcatatattcagtgaccatgtgtacatccttttctgtgacgtttaatttcctacgtcctgtctcttttggagggtcttccctatatttgatcctgatttagacgcagtcccagtgcctgttattctctgtttctcatgtcagcctgtccattttcctctgtcctagcttgcttctcatcttcacacagtgtctgttgtgatgtggttttgcatgtgagttccctgcttcagagtttggaaattctactgctgagctgtctcatgtgggatgttttctcccgtagcatcctaccatgccactgcctgtccacaccaccaagaagagatctgtcctgggccctgtgtccacaggtccaccgcctgtcaacaaacccgagatgagattactctgcccttcgggtcacaacgattcacctcaactgagcacctgtggacccaccaaaggacatggcagggacgttactgcctccctgctccctgttctgaagagctcccaccagacccccactctcagtgccaggctgccagccaacaggcctgacatgtcctcccatggtgctctccagcctgccatgcaggcgcttgccctgggtcctggccttaaatcccaggcagaaatcaaacatcccgacgcagatgcaaagcccagaccacagcaagtcagaaaacagtgtggccaggactccagaacccaggcaccagacaaggagcctgcccccgtccccacccagactttccagaaccccgcaaagaaagcaagattcagctccttccagacccctgcactgagaactcagctcccggatgtgggcgctgtgcagacactccagcctccccgcactgcaactggacttggatccaaagaggcacccaaggcgaccgcagagacagcagccaccaagacagcaaccctgcagcccagagtcaacctccagcccgcacccagctcacctttcctgggcccagcccagggctgccccgtcctccagcctggaccacccattcatgttccagggaggcccggcagtgtcaccttcatgagaggggacaagggacagaagagccccaggttcagaatgcctcccacatcccgtcctcctgaaaactctgcttctgctcagagccctcgcttctcaaggcagcctgaggggcagggtccccaggtctcaacgagtgtcctctatgaggaccttctggtcacttcctcctctgaggacagtgacagtgactgaggcccccaaggcaagaagacccagcttcaagcccatgcgacttggaagtggctgaaaggctgagaaggggagaggcaggaagcagccctgtacggggtcagcccttccctggcagcggtgtctgttcaaacgtggaccccagatactatcggggatcaacgaacctgcctatttacattgtataaatttaacctgtattaaaatggggctgttgaaagtatcctatagatttctttttcaattacatataattatatgagaaactgagtcaacataagcaaacaatgctccactagtgtcaatagaaagctctgaaactcatctgagggagggagcaaaccactgaaatttgagtaattctgggcaaagggcccttcaatggtagtggaaaacgtcagtgtctcctgagtcaagaatatttgactgtgaaggagagttgtagtgagaaacgattagccttggaaaatgggaaatatttttttgccttgcaagaatttttttaaaaatcagtgaattcaaatatttaagaaactgtttttcataccctatagttttttttatcagtccattcaaatatgtaataaactgttcttcataccctctacatttttccaggatataaaacaagggaaatactccatttattttatgaagctacctagactctgatttccactgtggtagagagggcatctcagctagcgcatgtgtaaagttgaggtaccaatattctcaatgttggagttattcagtggattcaataagttatgcaaagcacgtcatgaatggcacatggtaaaatatattttactattattattatcataccacaagtaaacaatagagtaacttgaagtttttaaacgaatttcacttataaggatgtattctactagccttggaacttttgttattaaatgtcattgtaaaattctgtttggttaatttctttccatatgaataaaattctctgaactatgacacgtcttactggtgttttgagttttccttttcacctcaggccaatttctttacatttcaatcatcgtgtttcatttacttgagcaaagaggactgggtgcccagagtgtcacccgcagacccatagcttctgagaaacacagaccctcaggcacagccccacccccacctgctcaatcagtagctgcagttgaataacaaccccaggtgtttcacatgtgggttaaagtgggagaagcacgaacatagactgactctcaacttggttgcacgttggaatctcctggtgagcttcccccgctggctgggtcccacccttggagagagtcatgttctaagtcccgtgtgaggctggatatagggatgggtggaccctttgaggttaagtcaaacatgggtcaaggttaggaaacactggagggagagggcgaagacaatgcttccctaacccgcctcctgaggaaactctcctgaattcagaaagatcagaaggctctgagggtgggatttcagtctcaggagagcatccctgtctccctaggacctggtccctaaaaagcagtggatggaattgtccaggctgcctcgtggatggggctggaagccatgaaatataaagagtgatctggaaactcaggttgaactcctccggcgtgctttagtgggggtgattttttaaaatgtgttataccagagtcatttcttcaacactgggcaaccaatttgctgtacaaagggtttcccagatacagaagttacactccagcacgttgtgtttagtacactctggtttgtctatgagctccgtgctgatctgaactgaagaaactgcactgttttttttttgtttgtttctttgtttttgaggagtctcgctctgtcgcccaggctggagtgcaatggcgtgatctcatctcagtgcaacctctgcttcctgagttcaagcaattctcttgcctcagcctcccaagtagttgggactacaggcgtacgccaccatgcttggctcaattttttttttttttttttttttttgtatttttagtagagatggggtttcaccatattggccaggctggtcacgaactcctgaccttaagtaatccgcccgccttggcctcccagagtgctgggattacacgcgtgagccaccacacccagccacaatatttttttttagatgttcttcaaacaaatgacttcctgcaatttgggagatgatttttttagaacagttttattgagacatcattgatgaacaaaactgcctatacggaagaagaagaacttgatgttttcatagggtatattgtggaatgattactatattccagttcattaacatacctatcacctcaacataattaccatctttgtgtggggggtgaggagatgaaatttaagatctatcctcttggaaaatttcacacataacaatatagtatttttaaacagtcattcctaaactgtacattagatctccagcaattattaatcttttttttttttttttttttttttttttttttttgagacggagtctcgctctgtcgcccagggtggagtgcagcggcgtgatctcggctcactgcaagctccgcctcccgggttcacgccattctcctgcctcagcctcccgagtagctgggactacaggcgcgcgccaccacgcccggctaattttttgtatttttagtagagacggggtttcaccgttttagccgggatggtctcgatctcctgacctcgtgatccgcccgcctcggcctcccaaagtgctgggattacaggcgtgagccaccgcgcccggcccagcaattattaatcttgcatacattactctttgtatcctttgaccaactttctcccatttctcccccctactgctcctggcaaccaccatcccactctctgattctatgagtgcgactattttgcattctatacataagtaagatcattcagtatttctctttttaaaaaataaattttaccgaatggaggttccccaaagaggaaaacacttacgttaaaacaattcaattattcattccttggctaacagctagattgaactactgatctgacttggagctgaagtgccctggaaaacatattttaaaaattgtcactcttttcttcccttgtagggtgctttaaattaagattttaaaatgttgaatattacaggtcaaatgcaattttatataaccacactgaagtggcagacagtgctaaggtgaagagctgaggatttgcatagtaaaataggaacaaggcagttataatttaatttttaaaactctcatttaaatttgcagtgctttaaacgagtattacttattcatttacatcaactttgttggttactacttagtaatcaacagagtttaggagaccataaaaatactctttctgttagaaaatacaacaaaaatataatttttagcagtttgactttcaaactgttctctgtagtgactcacatctgcaatacatctgttttgagaatcttgaaatgtgaaccctgagggttctatgaagcatttttaaacttccagttttacccatttttgactctttttaattgtatttaaacaactcttcttttttattttatttatttattttttttaggcaaggtctcactctgttacccaggctggagtgcagtgttgtaatctcagctcactgcagccttcacctccccggctcatgggatcctcccatctcagcctctccagttgctgggaccaccgacatgcgctaccacacctggctaatttttttgttttgttttgtatttttagtagagacaggtgtttcactatgttactcaggttggtcttgaactcctgagctcaagtgatctgcccaactcagcctctcaaagtgctgggattataggtgtgagccaccaagcctggcctaaacaattattcttcgcgtttaaaaattcattcacgcaagtacatgtttataattttaaaagaaaatggacagaatcctaaaacacaaacatctaaatttaacatgtatctttccaccagtatggaacagttcattcctttttcacacaaaatcagttatatgattggtgcattaactccaatctccatgtttatacagaatgctccatttgttaaacctctctgaaaagaataaaaaattcagatgattaattcacttacacttagaaactaagtcagtataccacaaatatatattgtgatcagttataatacaatatttcttggcctagggtttcaattaaacaacagaaaaaaatgaataaatactacagctaataccctgaaaaaatgcaaaaattcaaactttagcttgccaactaaaacacttgctttgagacggagtctcactcttgtcaagtgcagtggtgcaaactcggctcactgcaacctccacctccggggttcaagtgattctcctgctacagcctcccaagtagctgggactacaggcacgtgccaccactcccagctaatttttgtatttttagtagagatggggtttcaccatgttggccaggatgatcccacctcggcctcccaaagtgctgggattacaagtgtgagccaccacgcctggcttgcattttttttttctacttggcagcaaatgctgatggaattcagtgctgactacttaaagttgagtcacatcacacatttaatcagggtaataagaacatagcacacccactgtagagttacattaagacataaaaactctttgcttgaaatcaataaccgcgctgcacatgggacatctgtcaactgcttcagcacattgtttacaagtgaccagatgtccacaaggaataaaaacaacagcgatatgtctgtccatgcagattttacaaagcttctcctcttgcagacgccttagcggctcttcagggctgatttctctctgcaatgaagtctgattcaattcattttctgtagtgtctttctgagcgctcactagatctgcaacaagaacctcaagcgttttatagttgctcccagatgtttgaattctttcctccattattttcttaacgtccttgaaatcaaatcccattcgtatagcttcttgtagcataggattagggaagatggtatcactgattcttttagttagtgatggtgttttcttggtagtttgtaccagagctccctcaagtgaacgggttaaatgaatgttgtttatatattcatgtcccttctcttctagcagatatttgcaacctggataccatttagcatgctgttcccaaggatcttccttgggcttccagttggctagccctcctccacagtgaaagcactgtactttatcctcttgacctatagcataaaatccagctcttgcaagctgctctttgttaacggagtacatccatgtcccaaaagtaatgagccgggcttcataacccgtcatggatggattccttggagaacttgttgaatttgagaaattcctatcagaactcgcaacatcagattcacctcgaatattaacgttgtggcccaaaataaagaagcaattaggaaaatgtctcctgtgttctgaccaggcacgatcaccaggttcccagtttttcagttttccgccacaacagaagcactgcacttggtcatcagtgcctgtgtagtacagcccagcactggccagctctctcggggtcaagtgggcagaggctggccagttgtgaaacgactgttatctagcttcttcactatgcatggcggggctcctcgggtgtatggagtctgatctatccaccacctgtccagctctcaaaagccggtctgcacgagtctcagacggcctgtctaaagcacaacgcttttcctctcccagatggttttcaacttggtattgactatttgggacaccaggatttgcaggtttcgtggcactgtcttcaaaataaaagctgcggataaacctgcaattcggcgctgctttcttgtgtttgtcaactcctgagcccccacgttgccacctgtctaccgcttcagggcagctaaggccccccagggcgtctcctccaacgcgccgatgcccaggcaggcccaccacctgcaaagccagcaaacgtttttgatctattaatctcttctactaattcttcatcctcattgatgtctgcagacacatacgttttagatccttcgaaactgttcaaagttatcttctcttgaatataggacttgtccaccgtctcgcgccaggatagcggctccaaccgcccaggcgatcggccttgtcccaacgggagggtcccgcggagggacggtccgagccccctaccattggaaatgccaaaccctgccctaagccgggcccagccacccaggctgacgacccacgattagcaccgcgcgctctggggagccgccaaggtgcagccacttcccagagctccgaagggtcagcaagaaaagaggaagccacgaacgctcccagcctccagctggaaaccacgcggtggagtgggcgcttgcgcagtgagcacctcgtgccccacgcccgtgtctcgttcttttttgtgcttgtttcactttgcataattttagcatgatatcgtccagctccatctacgttgttgcaagtggcattttttttaaaggctgagtattagtgcactgtgttttatacacacgcgcacacacacgtgtgtaggttgcatggcactatatgtatatatagtgtgtgtgtgttgtatgtgtatctcacaaagtctttatccatttatctgttcgggcacattgaggttatttccgtatcttggttattctgtataatgctccaaaaaacatgggaattcaagatatattttggggattgtgttttaaattcctttggagattttatatatatgtgtgtgtataaatatatattttttcatataaatataattatataaattataaaattatataaattataccaaatgttataaaatatatttttataaatatatattaaataaatatatattatacatacatatatttttgggggggcagagtcttgctctgtcacccaggctggagtgcagtggcacgatctcagctcactgcaacctccacctcccgggttcaaggaattctcctgcctcagcctcaccagtagctgcgattacaggtgcctgcaccactcccagctaatttttgtattttgggtagggatggggtttctccacgctggccaggctggtctcgaactcctgacctcaagtgatctgcccgcctcggcctcccaaagtgctgggattacaggtgtgaaccaccgccccctgcctcctttggatatttacccagacatgtgattgttggatgaaatggcagttctatttttatgttttttgagatacctccatagtagtttccacaatggctataccagtttacattcccatcaacaatgtgtaaggatttcccacatcctcactgacacttatctttgtctttttgataatagccatcctatcaagtgtgaagtggtagctcattacagttttattttacattttcctgatgattagagatgctgtctctttttcatgtctgttgactatttggatttcttcttgtgagatgtgtctatttaggtcctttgcccattttaggacgagttattcatgtttttggtatcaagttgtatgagttccttatatattttggatatatgtgtgtgtgtgtgtgtgcatatatgtgtgtgcatacatatagatagataatatttttttcagttgtattgcctttctttttcttattgatttgagtacactatatatgctggaaacaagtaattccttggtttttgttctatctttcttatctttttattaatatcagctcttaaattttttataaactgaattgtcatttctccttttatacttcacattaatgcttttcgggctgtgtgagaaatcattttgttctcctttgatctattctaaaaatttcattagtcatctttacaatttaaatcagatatccattcagaattaagttgttgcattgcactaacaattgatactatgttcagttaagcctcatgacttttactggatggaaaccatcatgtttcattacggtttctactctttctctcatcaccactggagctcacatttctgtgaagccttgtggtcattctctcccttcttcctgcctactggacatgttagcaatcccacagcactacaaaacaaagctttgtgtccagaatctttaatgggccttttttctcaaagtatcaattattttcatatatatatatatatatatatatatatatatatatatatatatagacaaagttttgctcttgttgcccagactggagtgcaatggtgtggtctcggctcaccacaacctcccccacaccgcccccgaggttcaagtgattcttctgcttattcattttacaaataaaataaaataaaacaaaataatcccacctactctcctgaatagctgggattacaggcatgcgccaccatgcctggctaattttgtattttcagttgagatggggtttttccatgttggtcaggctggtctcgaactcttgacctcaggtgatccacctgccttggcttcccaaagtcctgggattacaggcatgagccactgcatccggcctattttcatattctaaagggagaagtccactgtgtttagagatattttccccatgcattccttatgtttcctacgtcttttatcagcttctgctccagactctctaaagattttgtgtaaaaaacagccttgaaagatggtggtactgtcttcataggcgttacaagatagataaattatttgaacaatataacaaagataatgccttccactgaggcaaaagttaggaagattttcttgcgatccactttaaaatagtgggggcagggtgcggtggctcacggctataatcccagcactttggaaggctgaggtgtgtggatgacttgaggccaggcgtttgagaccagcctggccaatatggtgaaatcctatctctaccaaaaatacaaaattagctgggtgtgagggcactgacctggaatcgcaattacttgggaggctgaggcaggagaatccgttgagcctgggaggcgaaggctgtagtgaattgaggtggcaccactgtactccagcctgggcgatagagcgagactctgtcgcaaaaaataaataaaataaaataatggaccgggcatggtggctcgtgcctgtaatcccagcactttgggaggccgaggcgggcagatcacaaggtcaggagatcaagaccaccctggctaattcagtgaaaccccatctctagtgataagcagaaaagagggttgaggaagggactttactggcccaaccagaaacaaactaagaacccaggactctattctctcccttggacaccctacaccaatccctgatgtcacataatgcaatttagtgtaatccgcagtgacattgattgttggtgtttaatccaagtgataatgaaaactgacttgtaatgtgcttaaggactttagctccaaaattaatctactgttcagtccaccctaggagaattatagactcaattttcagaattattaagagtgcactacaagaccaccatgcttctcaaagagataggagaggtcaagaggaatcacctaatcctgtgcagaaagggtgtctccaaatggcagttgctggaatacgaatgttttctctcatccttagtgcatgaatgcttagtggaaactgattgtctcctcctgaaaacatccatagtctcttcatactgacagattgttttccatcttctagttaaagaatcagcatttaaggaagtggtaacatacaaactgggtttcagagagcagcccttgggcacaaaagtttctaatgatgtattctctggtttaagcatagtctcatatgaatcccacagtgtactgctggaaatgaaagctgggagtcgcaaagaaaatgagtacttgaacaaaagatttctcagcaaggcaattttacttctgcagaagggtgctgcctataagcctgattgccatgagagcaccccaaacaaaggaaagcagggattcttattcctaacgcattgggcccctactgctgcgtcctatctccgttggctggagctggactgcacaatctagactgataccgattggctaaaaacttaaaactttactaaataggtaaaggcacaatggggaacaaagaaagggatggggttggttgtaggaaactaggaaaacaataacatttccaaataaggaaagaagcctgggctgcaagctgggacatgcctgggcatgtctaggcctgtccggacaggccaggaaacatatgggttaggcctcttggtttacagtacagggatataggattacttatttctttactgtgtttaccaactgcccggggcacaacaaagagttattagtagggtaaaagatttgttaatagtatgaaacatgaaggaaacttgaaagaagcttttaagtgggactatcattcttagaacttaatattattaacaaaaagggaagttttgaagaggaacttttaatttccacagtacaattttgatttgtaaaatacacaaaatttaacacgttaaagattccatttgtacaaggggcttccacttaacatgtttcagaaatcatgctttattgctattacttttacttgtatcaattatgaatatagagataagtatataatttgaaattactaacattaggtttctaccttgtatgattttatcacatattggtgtttcatttcccatagtttggagcaagacatagtgttcagtgatttctgtgataggttccaatttatttctggcataaaagcaaaatcttatgtctgctgccatctcaagatagaggcaattgtgcattctttaaatatgatttgtcatggagcagttcctagagaattataaggtcattctgcgtctatgttatgttaagatatctcaattttatttgaagtttgtattggcatattctataaatctttatccatgaatgtaaacttgttacaaagttacaaaataaaataacaccaatctacaataagaggacaggacttaaaatgactctatatacatctgcattacttgaagaagacagttaaattctcccttgcatagagtttaactccaccactctttaccaaccctgccaaggtcaagccccctctttgctctaaaattttggattttgacaaatcagtagctttatccatctacgtgttccttagctttccagtgaaagtaatagtcctgcctgttctgtgatctgcctgccttggcctcccaaagtgctgggattacaggcgtgagccaccgcgcccggcccgagtgtacctttttgagtcattttccttgagtagccctcatgtttttgacatcatttgtccactcctgttccaaagcaccctttcaaggattgttgtataagaaatcattctaagagatgttgacactgtcatcattgggggtaaaagacagacatgaccatgtaacaaagattctgcctcctgcttgaaggccctacatatttcatgacagtcttgatgatggtgggatgctgagagaaaaatgattttctggaaaaggaaaggacgggttgagggataagagaaggcacgtggtcatggagtacatgtgttcatcaagctggaaacaaggaggagtaggaagcctccctgctcttccatgctagtgaagctcatgtaagggaagaaggatttaaacaagcaactgaatgtgctttgcttactattcattcttttcctggcagaacagtgaagattcaagggtgacttgaaagcattctagcttccgtatttgagccttaagcagccagcaggcaggtggcactgggagggtcgagctttgctgctgccttccttaccagcgcagacactctcctgctctgcaccccagtttcttcctctgtccctatcctgacttcgtcaacattaaagaagaaactaaatattcttggaatttgttgtaagtggggaactcaaacttctacagctctgctggatatgcatgcccctgtttccattctggcctctgtggtgcattgcagggagggtgggctaggtgcgggggaggctgaaagtccccggggataagcatgggtcatgggtgcacgcgtgggcagaaaaagaaaggctccgtatctggccctccctggttgctgaacgtacaagcagaagaaggaagcttcgcagaacttagggtgaagaaacaaaagatgaaacctccctctaccctggcaggccccatgctcaccccatctacacccgcgcatttcccacaggctgcctgggatcctgtggtgcagcctgctagagtgtaatttctctatcagggaaactgtttgtacagcaaattgggtggccggagttgaagagatggctctcacgtaacgtatatttaaaaattaccttactaaagcacgctggaggagttcaacctgagcttccagatcactctttatatttcatggcttccgcccccatccaagaggcagcctggagacttccatccactgctttttagggaccaggtcctagagagacagggacgatctcctgagactgaaatcccaccctcagagccttctgatctttctggattcaggagagtttcctcccaaggtgaaaacgggaggaggcaggttagggaagcattgtcttcgccctctccctccagtgtttcctaaccttgacccatgtttgacttaacctcaaagggtccacccatccctatatccagcctcacacgggacttagaacatgactctctccaagggtgggacccagccagcgggggaagctcaccaggagattccaacgtgcaaccaagttgagagtcagtctatgtttgtgcttctcccactttaacccacatgtgaaacacctggggttgctatataagctgcagctactgattgagcaggtgggggtggggctgtgcctgagggtctgtgtttctcagaagctacgggtctgcaggtgacactctgggcacccagtcctctttgctcaagtaaatgaaacacgatgattgaaatgtaaagaaattggcctgaggtgaaaaggaaaactcaaaacacctgtaaaacgtgtcatagttcagagaattttattcatatggaaagaaattaaccaagcagaattttacaatgacttttaataacaaaagttccaaggctaatagagtacatcattacaaatgaaattcattcacaaacttgaatttactctattgtttacttgtggtatgataataataatagtaagatatattttaccatgtgccattcatgacgtgctttgcataacttattgaatccactgaataactccaacactgagaatattggtacctcaactttacacatgcgctagctgagatgccctctctaccacagtggaaatcagagtctaggtagcttcataaaataaatggagtatttcccttgtttgatgtcctggaaaaatgtataccatataaaaaagaacagtttcttaaatgtttgaattcaatgatttaaaaaaaacacattcttccaagaaaaaaaaatttcccattttccaaggctaagcgtttctcactacaactctccttcacagtcaaatattcttgagtcaggagacactgacgttttccactaccatcaaagggccctttgcccagaattactcaaatttcagtggtttgctccctccctagatgagtttcagagcttttactagtggagcattgtttgcttatgttgactcagtttctcatataattgtatgtaattgaaaaagaaatctataggacactttcaacagccccattttaatacaggttaaatttacacaatgtaaataggcaggttcgttgatccccgatagtatctggggtccacgtttgaacagacaccgctgccagggaggggctgaccccgcacagggctgcttcctgcctctccccttctcagcctttcagccacttccaagtcgcatgggcttgaagctgggtcttcttgccttgggggcctcagtcactgtcactgtcctcagaggaggaagtgacaagaaggtcctcatagaggacactcgttgagacctggggaccccgcccctcaggctgccttgagaagcgagggctctgagcagaagcagagttttcaggaggacgggatgtgggaggcgttctgaacctggggctcttctgtcccttgtcccctctcatgaaggtgacactgccgggcctccctggaacatgaatgggtggtccaggctggaggacggggcagccctgggctgggcccaggaaaggtgagctgggtgcgggctggaggttgactctgggctgcagggttgctgtcttggtggctgctgtctgtgcagtcgcctcgggtgcctgtttggatccaagtccagttgcagtgcggggaggctggagtgtctgcacagcgcccacatccgggagctgagttctcagtgcaggggtctggaaggagctgaatcttgctttctttgcggggttctggaaagtctgggtggggacggggccaggctccttgtctggtgcctgggttctggagtcctggccacactgttttctgacttgctgtggtctgggctttgcatctgcaacgggatgtttgatttctgcctgggatttaaggccaggacccagggcaagcgcctgcatggcaggctggagagcaccatgggaggacatgtcaggcctgttggctggcagcctggcactgagagtgggggtctggtgggagctcttcagaacagggagcagggaggcagtaacgtccccgccatgtcccttggtgggtccacaggtgctcagttgaggtcaatcgttgtgacccgaagggcagagtaatctcatctcgggtttgttgacaggcggtggacctgtggacacagggcccaggacagatctcttcttggtggtgtggacaggcagtggcatggtaggatgctacgggagaaaacatcccacatgagacagctcagcagtagaatttccaaactctgaagcagggaactcacatgcaaaaccacatcacaacagacactgtgtgaagatgagaagcaagctaggacagaggaaaatggacaggctgacatgagaaacagagaataacaggcactgggactgcgtctaaatcaggatcaaatatagggaagaccctccaaaagagacaggacgtaggaaattaaacgtcacagaaaaggatgtacacatggtcactgaatatatgcagaattgtcacttcaggaatagtgttggggaaagatagccaaccattctgtttgctgcgactatcacatatgaaaattaaaaccgtctttatgttctctattgttaatatcaagggaatatcaattccccaaacaacgtggagactggaaatgtcacagctccttttgaaagcagttgtaagatcatgcataaaaatgaaggagacgccttatctgcagccagtatcccgaaggcatctgatcagtcactccccacgggcactgaaatgcgcccagcagcatttgctggccaacttgcaaataaaggtacagaaaccaatgttttaacaaagaagctggaaactggagtatgcaaagtcctcaggtagcgtagttctcctgcagggcagcctaggtcttaacatgacccccacccatgaagggcacagaagtgaaggaatcaggggacctagaggagaaacagagcaggggcagggggagactcaccctcaggaatgaacaggcttccgctggctccttccaggcttcctgcgttttctcttggggagttctgggaaatgtctgcttcggagctctgttctgctgctgctggggactgcagaagaaatcacgttcactgtctggacctgcctgaccctccttgtccacaccagtgactgggaaccaagcaccctcccggaacccagccctagcccttgctttgggtgagggaggcgttcaggcctctgtgaactctgccaagacagccccttctctcatctcagaagcagccccacttccaggaagctccgccccccacccccaccatggccccaggttctctaagttcattcaggccctggaactgctctgcctgcctcgggtaacatccccaggtctcccacagcccctgccctctagagactctcagcgctggaataagctcggagtgcggaccctggaaggcaggggcctccgtccacctccatttggagctttccttgtgtgcttagagaaggctgcacagaaagactaggggagacaccagctcctgaggcgccgacctcacggatcttccttgaccctgcaaaatccttaccttggacttcgctccttttctctgtcattcgtcgtaaagggccctggagtcgtaaagggtagctgggcctttgctggtttcaggttctccttctccttgtgtgagcccaggacctgcagaggaagggccccactccacctcttaatggggcaggtcttgttcctggctgagtgcccaaaggccccgcagttcttgcatttcacctgcaggtggaggaggacacagagcagtgagtcaacagcaatcacaggcacctgcaaggttcacacaaggcctgggttttggagatggattattttaggagggggacatacgcccatgggctgttggttgccaggaaattcaagatattatcgtcctccccagagcccgtttaacagggatcccaggaggaaggacgcttgtgtctgagagtgaagataatgaaccggtgttgaggactcggcaaacaccaggctggacatgacactggacagagaatgaggctgctcctcagagactccgaatgggccaatctgccaagacaggaggctgaccgatgtggtcagactgagaccagtgggaactcttaagtcataatcacgagtcccatgttcaagcccactctctggtgtccataggttaccaacattttcaagcccccactgaccctggattcctcctgctctgctgggagagtcgtctgccccatgggtctcctctgctgctcctgtgggttcttggctccggggggcccctgagcctgatgatggatgggatgaccggccatctgtggcaggtccttgaacttctgatcattcttcttcattaagtggttgttggatttcctagtcataagaaaaagagaaaacattacacagacaccagacgaaagtccctcctacccctgtctacccaagtagggatggagggatgcactggccactgagtcacgcccactgtaacttggtcctctctgaacccaggtcccagttgtgctattttgtgactctctcccatcctgacctactcccagaacaggacacagattttataaaccaaaggctgcttgatttctagagggcgaagtgagatttgcagccttgcataaaagttttctgggctctcggtttgtgtgcagtcagtgcctcagagctgaaaccctctgacaatatttatcaaagccaagacatgaacagccaacaactactgatttttttccagcaagttccagaaaaccaactattttcatagaatagcttctcactcagaaaaccaaccagaagctcaaagctttgcaaagttttcatattcaacctatggacactcgtgacgtttcacgtgagacccctgtgaccacacgccactcttcacacagaggcaggcacaaagccaagtgaggaccagccctctgaggatcctgcgacgctgacacatatgtgcgtgttcacgccaggcttcgcacacatcactggccgtgtcatggggggacacgcaagacggaagcctccaggcgtgttcagcagaaacctcgagcccacactgtgcttcagagtctcccatgccgtccctaccttactccctaatacttatcttacctctcctcttggtatcaaggtctctgtgaaattgtgggtggctggtccactgaagcctggcattttttattcgagacacagcgggcggtcggatcctctcctggcttcagaggaaatcgcagaagaacctccacagaggcgagaacaacccatttctctgtcatcaagtcaatctaatgcagagaaaggagaatggagaggcaacctgagttctgcaggcaggaggaagccttggcagaggagaggaggaactcccatcttcctgagattttaaagggaatgctgggcaggctcacatttcattgttttttttttctttttttttaaagaagtcgttatgtgaaaaagatacttgcacacatatgtttacagcagcacaattcgcaattgcaaaaatatggaaccagcccaaatgcccattaatcaatgagtggataaagggactatggtgtgtgtgtatctatctatctatctatctatctatctatctatctatctatctatctatctatctatctatctgatggaatactactcagccataaaaggaagaaattaatggccttcgcagcaacctggatgggattggggactattattctctgtgaataagtcacgaatgcaaaaccaaacaccttatgttctcactcatgtgcgggagctaagctatgaggatgcaaaggcaatctcacagttctttactccagagctggtgaggagttggctgatgaccttcaaatggcaccaagagtgacagcccagggtattgggaagtgctgctgttcccaggtgggaactaaggggccatggcagtggcattttcccatgtccctttgaggaattacgtatcgattttaatgggtcagtgcccgtgtatggagggtgtgaaactctgaatatgagccggtcatggacggggagcctgcttcagccttcccccaggcttggactccacccattccacctgcctcccaggtgaccccgcagctcccgtactcacatctctttgtgggatcccgcactgctttaagaactgcttcccctgttccatggagagagtgttggggtccatcactgctggtcctgcctgagggattctctttccctgtggagggtagaaaatgagacgctgattccttcctatccctggactctcccaggcacaggatgcagtcagccccatctctctgctgtgcccaccgtgtccctaggagtaaactcacacatcctgtcattcaaactacagggacacatccttcctctgccagtgacatgacaccaatgtgaatgagaaaagcaggtgatccattaaaagaattgttcactggacttagcgtgtttgatatgtatgcaatgcaggtccctcctctggagactctcatagtataccatcaaacatccggaaaaattgatcgtggaattggcctcaaagaaaattcaatatattagaaaactgaatattttaatcatctgtacaccctccttgtcaaaactagatatacctacattttataagttctttctaatattaaggacgttttaaactatgaagcacattccttgaactttctgaaatcagactccttgagatcaaacaagatattcaagggaaaccatcaagtgctaagaaaatacaaaataaagcacttttatgtccaaactgatgagcagtgcaaaatgtgggttcaggggaaatgtctttggctaaatgaccacagtgctagggaaacaggagcataggagagtgagggcgacaccatttagaaatcaactccatctgaaaactagtgaggcacagtcctggccagtcaccaccctggtcctaagacgtttgtggctgaggaagcagcttagcaatgcctggatggacagactcctatgaaagcaaaatgtccagatgccccatatccaaagcaatagataccttcaagataatgatagctatgcttcctgagctacacactagaatgtcaaggagagttttctttaaatcaacagaatactaaacattgtcatgctgtcagtccaccacatgtagacacagcttagttgaatcttcacgtggacaaaacccctatatcagaaaaacttaaagacagtgcattcttctggttgcgttctgaggtcaccgtactctgtaatatagtagctgtcaataaactctcttcacactgctctctgcaatttgcctggaattccttcctgcatgagatccaagaaccctccctcagggtctggatcgggcctcttttttttccacaacaacatgattgaaaaaagataaaatctgggggaagcactcaggcctatggagacagcttacagacagaacaacgaaagattgcaaaagaaataaaaagatggaaatggtaaatcaaacaataaattggagctaatgaaaaaataaatagaatacagcaggaaaacgtactctttctttgagagcagtagtaggatacattaccatgggttaccacagaaagataataaaatttatcttaatagatcatatcagggaaaagaaaaggcaataatgccatgaaaatagaaaaaaaatgatcaaggaatgctatctggagcaaacgcacttgagaaatctagaataaagtgcgcgttccttttcaaaatcaaaattgagaagtgaagaagcatttttaactacatatttaagtaggatcattctttacaccatcattatagactaggcactcacagcttaagtcttgcttgccttaatctttgggtagaggctcagggccctgaatttatactagctcctagcaaaggtcaatgagtatactggaataaaagataagtgaagaaatctcttatctaatagcttcttcgtcaaaggcaccaggtctccataactgatcatccagcacccacacaattcagggtgctgggtgatcattcttagcaaatgttgacctttatgtaatcattaggatttctgaaatattttttgaatctggctatgtcctaagaaatactgttaaatggctgggcgcagtggctcacgcctgtaatcccagccactccggaggctgaggcgtgagaatcacttgaaccgggaaggcagaggttgcagtgagccgagattgtgccactgcactccagcctgggtgacagagcgagactctgtctcaaaaggaaaaaagaaatactgttaaacaattaagtattctttacctcaacatctaaaaccgcacgctaaagagttttcccactattctatttctcccattgggataaatgaacgcccgaaatagtaatggactaacctgttcttcttgcctaccagcagcaactcaggtaagtggacccagggcaaacttcactccttacgctggggcttccacagtgaaggaaacaaagctcactgaggggaaggtcccttctgctggcatttatactgctccagagccccgcagccactccccctggctaacctaatcgcgatatgatctaattacctctccctctcttgatttatttggtgatcctgttcctagcacttttgttttatcacagatgtatacatctaaaacaaataatttgctgtatgctcatctcataaaattttaaagtttaacatagaagcatatggtttgaacaacacaaactactttctgcatgtttcaaatattgaggcatacatcaacagcctggctgcctcattctgcgttttgcaccgaggtgggcagctcggtctccccatggcaggaagctcagtggcaatgtgtactggagattctggcctttgtggggccaaagataagtggtctaagaacagcctggttcactatgtgtcgggggaatagatgaggttgtgctgtatggccgtaggggatgggtcacccaaagtctcagacggggagaactgtaacaagccaacagctcagtttcagcgacagctcctggaaagtcagtggctcttgctttttatccctgacgggaacaggaaggcaaggaggcctccagggtgtggacaggagctcagcaactgagtgggattaagagatcctgaggtctagatagcacctggttattgagggtggagtgtagactcacctctctgctagatgagggggctgagtcaggacgtgggagttgatatagtttggatgtgtgtcccctaatctcctgttgaactgtcatccccagtgttagacctggggcctggtgggagatgattggatcgtggcggcggttttctcatgaatggtttagcctcctcccctgtggttgtgtcctttccagagtgagtgagttctcctgagatctggtcatttaacggtgtccagcagctgcctcctcactctcttgtccctgcttttgccatgtgaaatgtctaatccctctttgccttccaccatgagtaaaagcttcctgaggcctctcagaagcaaaagctgccatgcttcctgtgcagcctgccgaactgtgagccagttaatcctcttttctttataaatgacccagcctccggtatttctttatagcagtgcaagaacaggctgatacaggagtggtcccaagaattctcacagcgatatcaggatgtggggtccctctatcccattcgggtgggtttctcacccacatgaagcagaactgctgaaacttgtttcctgacacatttttatttgcattaataatttacctcccccacatttatactaaaaatccacatacaatgattcagttagacgggaggaataattatttgagatacggtatagcattgtgactatggttaacaataaggtatattattaacatgcaaaattagaaagagagtgaatttcaattgtcctcaccaaaaaagtatgtcaggaattgagatattaatttgattgacttaaaatttccacagcatatacatctatcaaattagtgcaatacaccccataaatatatacaattattatttatcaattaaatttgttttttaaattcacacacaaatgaaaatggaaaaatggccagtagctgatttctgcacccaattctttcacccccaatcatacactacatactgtgtgaccctacgcaaaaataaaatctcatgtctagcactatcaattacgggaaaaagagtatttttttaaacaaagatgtttccaattacagtggattgttttttattgcaaatatttcatagattcaaaaaggattttaaggcgtctcttattaagtatatttaatttacttttaattgacaaatagttcttatgcatactcacgggtccgtggcgtccttaggataggtttaatgcgtggtgattaggttagggtgattaacatgtccatcatctcaagcctgcgtcatgtctctgtgttggggactttccctctcctccctctagctactggaaaccctgcgttattggtaacgatagccatcctgcagtgccatggggcacaacacggtgggttcctaggcgcgctccccagcctgggccctctggaggcgtctcccggcagtactgagccacgtggcgtggactgcacggggtcggtgacttcaaaagccccacttagatcctctgcacttaccccctgcagagcaccgacagccctgctctggaagcgcgggtctgcttagatgtcctaagcaacttcttgcaccaggcgccgccaatgaggagttcggtggatttctaaccaagtcccatttcaccgagagcggagtcccgcggggaccaggaggttccttctcgctccgggagagggcgctcctgcccggcgtttgtagcggcggcttcctggctgcttcccagcgtggatttgcacccggtcgatttcctgcgggtgggcggtgcatgaccctggttggacgccctgtttacccctcttctccttgggctggaactcccagagctggaggcagtgcagccacggctgcgaactcaacaccagcacattcttagaaatggaaaaccctttctttacctctgatgttcatacctgagagtttaaaaaatacttacaagttttattccaggtggcgggctcacttgaaaagcaaagatagatgtagataatcttttgtgattttatgcattcatatgtgaaacgcatttagaatgatatccagtatgcaataaatgttaaaaatttttgtctctttcactccagtttgaaaccgtcattattttttttaatttcttgactccaaagtcatgcattgaatatttcctcagcacttcagctcctggggctggagaagcacactggaaaatgagtgagtgtgctttcagcgatatccgcatttctagaacagcatttatttttgcatatgcatgtaggacacagatacacagggcgggtttggggcgggacctcgtgcggtgcaggcgctgtgggaagcgttgccctaacggctggtctccagggctgcaggtctgggcctgtgtctggcacccacgtgcgggtgtgcgcgagaagcgccgttaaagacagagctcatcctgttagctgtccctctcatccccgcccctgcaacctgagtttcccagattccttacgtcccgcaatgtccgagttgatgcgctgaaagagcaaagagatcaaaaaaagaaaggtgggagaaccgcgccacacattggttgggatatttaggttttacagccgttggcgaaggcaatttagcaattatccaaccatagaagtaacgtgcattcggccgggcacgatggctcacgcctgtaatcccagcagttcgggaggccggagtgggcggatcacgaggtcaggagttcgaggccagcctggccaacatggtgaaaccccatgtctactaaaaacacaaaaatgaccggctgcggtggctctcgcccgtaatcccaacactttgggaggccaaggcaggcggatcaggaggtcaggaattcaagaccagcatgaccaacatggtgaaaccccgcctctactaaaaaatacaaaaattagccaggcgtggtggtgcgcacctgtaatcccagctactcaggaggctgaggcagaagaatcgcttgaacccaggaggcggaagttgcagtgagcagaggtcgccccattgtactccagcctgggcgacagagcgagactctgtcccaaaaacaaaaacaaacaaaaaaacatacacacaaaaattagctgggcatggtggtgggcgcctgtagtccctgctactcaggaggctgaggctgatgaatcacttgaaccctagaggcggaggttgcagtgagccgagattgtgccactgcactccagcctgagcgacagagcaagactccgtctaaaaaaaaaaaaagaaagaaaagaaagaaagaaacaacatgcaatcacggtggagccgcagtacacgtgtcagaaccacccaataatctgcatgttcgcacatcagtgtgttcagccacctacactcccggcagcgtttcacagcaggagacagacaagcacatgcgactctgtacaggggtaaacaggagcgattcagtaacatgcttcattcatacgcaccaggaaataggatgcagtgtttccgagaaggaggtatagaaacatcttccacactcatcactgactgggtgaagcaacacgaacaatgactccaacatgaacacatttatatgaattttgaaggaagacaaaatgccttaatcatgtatatgtgtatgtgtatatacaaatagacctatgtatatgtccatctatgcaaacatatacgtgtgtctacgtagagatttgtctatatttgtatctgtgtctatctctatagatctatgtctctgtatctctacatttagatatagatatgaagatatagatctatatctgtctatatataagatctttgtacatgtatctatatagagagatgtatttatttatacagagatatcaatatataaaggaggatacacctcaaactggtaacaatcgttatgcctgggatcagccttgtatctttgctggggtatttatagctcactttatttaactgtttaaacattttatcattaaattggatcctgtacatatccgtttcccatgactccaccattacacaacgtcagcgccttacaacagcacccatttattttctccccataggtcagaagcccacagtgcttggctgtgtcctccactcagggtctcacaaggaccgaatcccggggtcagctgcctgggcttttctctccaagctcgggggagaatctgcttccacgatcatttaggcggctgacaaatctccttttcttctcatgatttctacctgcctatcctcttcagagccagcagcagcctgtgaaatccccctcttccctctaagccgtgacttcctcttctgcggtgtctctaacttctttgtctgctttaagagctcacttgattacgttagactcctggatcatccaggataatctcccgagttcatttcagctgattgttaattacatccacaaagtctcttttgcctacgtggaacttaacataaccacacgataacatcagggattggagaaccaaccaatgcatttttttatggtaaaatattattgaaaaaaatattctcaaagtatcagcaaaatgattaccactctttatctcttgtgatggtttctggtgagagaaaagcaaggggaaagaatactagaatgttgaattctgtgttttattttcttcataaagcatgtgctatgttttggaaataccacagtaagtaaaaggagctcatcctttcgaacttgggacacaaaataaactcctttcattccatgaccctggcacctcttgtccccacagcatctagtatcccccatatgcttagctccttgcacgcttttcccctgtgcactcttaaaacctgcagcgtactctactgtctgaaaattaacctccttgtgcctttaagcctctgtgctctgtctcctgttcagtatcagttccctgcatttacaggcactctgtctcaacggcatcctttccatgagcccgcagatttaccctatgtcacaaacccgtgcaatgtcacactctctgtcacacactcatgcaatgtcagaccctctgtcacacacccaggcaatgtcgaccccaattctccagcttttctacttaatgccttgggccaaattagcaacgtgcacatcattttatacgttgcacatggtgacgtcatcatcatgagtggtgcaaagtggaaagaagtatacaggctgaatcacaatagagccatgaccgccgctattctccagataggaacctggtgtcaagatacaaatacgtgtgctgacgctgcgagtgtggtgtttaaaggtgagtgggactgtgtgagtctgtgtgagtgcagggcatagtgagtgtgtttgaatatgactgtgggtttgtggtgggtgtgtggatgggtgtgagcctgtggtggaatgtgtatgtgagggcgagtgtctagctgtgtatgtacgtgatgttcctttgatttgtgctgctgtgcatgtacgtatgtgtttgcatctgtgtgtgtacatctgtatgtgaatatatgtgtgtgtgtgtattatagaggttgttcatcttatggctctaatccctgatgtggaaattgagaagcattgaatgccagacaagaataaaatggactcttctttgtaggaaaaaagaaagcattaatttgagctcatatttcatatttcttattttattacaaaaacaaccagtgatcattgctgaaaacttagcaaaaaacaagtgcagaggactgtggcaaccatccaatgctcttgaatcgagtaagcagcatttgcttccctggattgatcaagaagtgactttttagccacctgatccacatcatctagattccaaattaattggcattgagccgttggcatcctgtttgtccttttacttgtatccctttgaaaatccttctcaggccctctgtctgggttcatttctctgcacataacctaatgatgctgcagctgagtggcgtgaagattaggaaagagctcgctttggggcagaacctcccagcaaagcagagtatccggggacactcgtccctcactgtgagtgtgtcacaggtcagaactcagcgtttcctgctccctccatgtaagactgtgtctctccagggaatggagacgaaagagcctctcccaaacactcctcatagtctctgaagagatgctggccagaaacttgtcattgcttttggtgattagcaattgggaagaaaagttgttctgaaacgttctcagctccccaaggctgcactgtcgttgccactgcaggtgaaaagataattgcagttctgaggggaggtgaggtcacagaaccacaaaaccatatctcaaggtctggctgcttccctcccacacgatcctggctgtggcaaccttcgcactgagcccaccgtcttagcagcaagatggagctggggagaaagtctctttcggtctgtagggaagggtgcttcccaggagccagggtaagttatcctattataataagaaattgttctagattgaaaactggtctagttcccaagtcacagaaaaaagaggaatagttcggagccatgagctgagctagcaaaccgaaatggggtcctagccccacaccaatccctggggggtcctgacgtgatttaggagaatccacactgacccgcattgttggtgtttcacccaatcatagtgaaacttgactacgttcttaaggattaacattcttaaatcaatctgtcgtaataatgaaagctggttgcattcttaaggactgtggtactaaaatcaatctgctgttccgcctacccaacaggaatcatagactaaaatttcaggattgctgaggacgtgactataatatcaccatgcttgtaatgagtagactgactctacaggagtcatgtaattccttacacaaacagtgtatctaaatggtagttgctggaacgaaaatgttttctctaattctgagagtgtgcagggcttaatgggagcattaattgtgtctccactgaaaaccaccatagtctgttgattatggtgagactgtctttcctcttgatgttaaggaggcagaatttaaggaaaaggtaactttataataacgagctaaagagagcagctgtcagactcaaatgtgtcctctaatgtgttctctgcttcaaatagattctaacatcacccaaactctctaatttctgtttatcaactatataacacacatccattagagtttccaattttcatgtttgtcacactttaatttaattatgcaaatattgtcctaaggataataatttctttaactcagttactaatggctctagatatgtcatctaagatttgtaagaatttggttattaccgtacactattttatcccatattggtgtttcatgtcctattgttttgggtaagacatgattgtggtaggtgcctttatgcctttgtccttggcacaaaagcaaatgctcacaatgttttttactctctttccattctaatattgatccgtgcttgcagtcattaaatccaatttgttatggcacaggtttctatagtgttaaactgtaattcattcatctacattttttaagatctctaaacctttatttattcagatattgacaaatagaataaatttttgcacatgatataaaatcattacaatatacagtaacctactacaagactaaaatataatgacaaggaataaaaacaaaggtctctgtatgtgtgtgtcttattcaaagaacacagctatctagctttgttagtaaactataatggctaaatgcactctctgtgcaaaaaaacaaggcaggttcaagttcgtgcttgcctgtaagtagggtggaaatgtcactagccacttcacctctctgtgtctatgtccttctcatatttacaatgaaagtaatagtaatgcctgcctcataggtttgtgaaaaaagaagttgccgcacgtatgatctgcacagcagtgattcccacatgggaagtgctctttaaaggttacgcattcaactctcaaaagcctcttaagagaagagtgactttaagtatttctaagggcagagcaatgggaggtggagaatgctgggttgcaggtgacactataaacgtagctcatgcctcctatttccatgcaggacctcccagccctgaagacaaacatcagtgacagacatcagtggcagaatggcctcccggtatgtggcagtgggaatgatcttcttatcacagaccgtggtgggagtcctggggagcttctctcttcttctccattatctctccctttactgcactgggtacaggttaaggtccacagatttgattgttaagcacctgattgtagccaacttcttagctctccgctgtaaaggagtcccccagacaatggcagcttttggggttagatattttcttaatgctcttgggtgcaaacttgttttctatctccatagagtgggcaggggagtgtccattggcaccacctgcctcttgagtgtcttccaggtgatcacggtcagctccaggaaatccaggtgggaaaacttaaagagaaagcccccaagcatgttggcttttctgttctcctgtgctggatcgtgtgcatgttggtaaacatcatctttcccatgtatgtgactggcaaatggaactacacaaacatcacagtgaacgaggatttgggatactgttctgggggaggcaacaacaaaatcgcacagacactgcgtgcaatgttgttatcattccctgatgtgttgtgtctggggctcatgctctgggtcagcagctccatggtttgcatcctgcacaggcacaagcagcgggtccagcacattgataggagcgatctctcccccagagcctccccagagaacagagctacgcagagcatcctcatcctggtgagcacctttgtgtcttcttacactctctcctgccttttccaagtttgatggctcttttggataatcccaatagtttactggtgaacacttcagccttaatgagtgtatgtttcccaactctcagtccctttgttctcatgagctgtgaccccagtgtatacaggctttgctttgcttggaaaagatgacaagatcccctaaactgatcataaacatgtgaaaacatgtaagttgtatatatttgctcattgtttaattgatgattccctcttccctgcagtaatgtacacatgattatgaacctgtcacaatcatgagaaggtgatgaacaagacagggtgaacttccatcccaatggtaaacaatatctagtaagaacaattataaatgaaacgatgaaattattatgtaaatactcatattattaaagctttattaatacctgcagtagagtcattagaggtccatgcaatttaaattaggtcatgaatcatgatgaaattattatgtaaatactcattattacagttttattaatgtctgcagtggagtcgttagacatctatgcaattaaaaaaaattaggtcctgaatcaaactggaaattatggggatctttttgagtgtgcaaccttcagtctgatataataaatctatgcagaaattaagtaagcatgagattgctgaagaaagttacatggggaagtagcaatgtgtgaggtgatcattcaagaaactgaagaaggaaatgttctccggtagtgatgacgtagcatggagataaggttttggtcaataccagaactggggaccaagttataaaatcagacagatagtagtcatttaaaatatgattatatggaaggaaattagtatagcatatttaaatcacttacatatataaacagttagactgatcgacagtaagacaaaggagagtacaaaaaatatatttatgccaaaataaaaacatcaggtgagtgctgtctattaaaaaaccaatgctggctgggtgcagtggctcatgcctgtagtcccaggactgtgggaggccaaggcagaaggatggctcgagctcaggagtttgagactagcctgggcaatatgtaggaacctcgtctctactgaaaatacaaaaaaaaaaaaaaaaattagccaggcgtgttagcacatgcctgtagtcccaggcacttgtgaggctgagatgagaagatcacttgagcccaggaagtagaggctgcagtgagctgtgatcacaccactgcactccagcctgggctaagggagtgataccctgtctcacaaaaaaaagaaaaaaaaagcagatgttcaggatctaaatcagtagagggtaatttttttttctttatcatgtgacgatgccaattgatcatgttagaaagaaagagattttggggtgggtgttctcatatccctaaggcgagcaagcaagcacaaccactcattttattaaaatttacttgaaataacagagaactaaacaaacaaaagaattaacaatgaaatatcttataaatacaagcatttattttaaatagatgacaacttatcttagatcacaaaaaagaatagaaacaaagaaaaactgaaaaacatctttacacttgaatttcataccagccacttttgacttatgtgctctccatctatatatttctgtattgcctcactctttttttttttttttttttttttgagacggagtctcgctctgtcgcccaggctggagtgcagtggcgggacctcggctcactgcaagctccgcctcccgggttcacgccattctcctgcctcagcctcccaagtagctgggactacaggcgcccgccactatgcccggctaattttttgtatttttagtagagacggggtttcaccgttttagccgggatggtctcgatctcctgacctcgtgatccgcccgcctcggcctcccaaagtgctgggattacaggcgtgagccaccgcgcccggccttgcctcactcttaacagcttgctgtaggtattactgtttttgatagacttggcccttgggtttcatgctagagttatgagtggactgcaaggcacaattacagtattagagtattctgggcttccttttatacttcattttaccagtgggtgttgtgccttcaatttttgtgtgtgtgccaattggtgtttagttcatgttgaataactccttgtagcatttcttgtccgctggatctgatggtgatgaatgctgtcaacttttgtttgtccgggaaagacagtttcctcttcctatttgaagggtagctttgctgtataatatttttggatggcagcttttttttttctttcagcactttgaaaatgttgccccacttcctcttggtctgtacagtttttgttgaaaagtctgttgtgagataatttggagcgcccttgagtgttatttgcctcttttctcttgcaggatacttcttacataaataagaatagtgactggtctgcagaaatcttagatttaaaaacctcttgaatctaggaaaccaaatcaaggcagatttcagactttgtctgcagtacccaaaaacaatttaaatataatatcacggtcaaaaccttggtaatacaatcaatgttttaaattctatcctgttacaaagaaagcagattcttattgaacttatgcaaacaactctattgccataaaataaaaatacacatgaagagcttcaaattttaggcagatcaaatagggatcacatttccacctctgttcataaaagtatatattaccaaattgctgtaaactttaggtagcttaatagagaacgttttctgaaatctggaaaacaaatcttttaggttaaataaccaaaactgtatccaaaaagtcattaaaatatgatcttcataagttattaagtctcccgtaattattttttgttgtatttgatctcaattagcagtttcatgaagccattagttcccttattagagttccgaaaatttttacttagtctattgtttttaaggttatcagaaacctgtcttcaggagtatttgtcagagtcttctccatgaatccgattgcaaatgccattagagaagaattacaacagtggatggcaaagacttagactagctacaattaagaatctaggctgggcacggtggctcatgcctgtaatcccagaactctgggaggccgaggcgggcggatcacctgaggtcgggagtgggacaccagcctgaccaacatggagaaaccccctctctactaaaaatacaaaattagccgagtgtgctggcacatgcctgtaatcccagctactcgggaggctgaggcagaatcacgtgaacacgggaggcagaggttgccgtgagccgagatagcgccattgcactccagcctgggcaacacaagcgaaactctgtctcaaaaaaaaaaaaaaaaaaaaaaaaaagaatctgatgatatttagccatcgatgaggaaatttagttatctctatttcatgcatcatggattcactagaatcatgaattataagttgacgccaagaccattagacttctataaattttacataaattttggaacactcacatcaataataaattattcacttgaccagagtgacaattaaaatatttaaaaaataaatacagaaaattacatggatgttaaatttttaaaaatacccttaactttatttaaagctcaacattgctgagtaattaaagcataatgacgataacaggaagtgcacaggaaatcatcttgatgaaacataacatgtttgttctctaggccagttaccaaaaggtaaagaaaaacttcctgcaatgtgattgcttctccctatgggaagcctgttcagataacctggaatttgaacctgaagaaaaggtacttaaattcaattagatactggaagagtgtgtgtccaaagttataagcatacaccctattacagaataagtaaacaaaacaactagtaccttgggcaggggagcatgtggcttttagaaaaagtaaaattatgtgaaattttctggttacatggaaaaaactcagacacatcaagaaaaaccaagaacatagaatcaagttacactggaggaagataaatattttcagtgtcaggtcaatagcagagtcagaactgaaaaaaaaaaaaatgctgtagaagcagatgaaaagttgagagagagagttatttatttcagccaagcaaaaagttgtaccccctcaagaagaaaaggaggaagagctgaaggcaatgatgcatgagatgtagcaaaagttgtacttctgaaatatgaatctgaaaagcttcaaaatccctctattttgagaaatgaaattactatttaaatggagaagatcacattttaaatctggaattaagtagattaaatgtaaactgtaaaacaggaaaaaaccttgcaatgcagacgatggttgaaaatggatagaaacagatttcagaactaaaaatcaaatcctattgtaatttttattaagagcaggtcaacatttcaagaaaaccccgttgctccacacataatagaccagattctgaattacatcagtgcacccctgacatcaatgctcaattcttaggaaaacttataaacaatttcctctcaatgccagccaaccccatcacacaaaaattctttcccaagacccatccttcagaaaccctccacgttgctgggcgcagtggctcacacctgtaatcccaagactttgggaggctgaggtgtgtggatcacttgaggtcagaagttttgagaccagactggccaacatggtgaaaccctgtctcttaccaaaacctcaaaaattagccaggcgtggtggcacatgcctgtaatcccagctacttgggaggctgaggcacaagaattgcttgaatctaggaggcggaggctgcagtgagccaagatcgcgccactgcactccaacctgggtgacagagcgatattccatctcaaaaaaaaaaaaaaaaagaagaagaaagaagaaagaaagaaagaaaaaaagaaagaaagaaagaaagaaagaaagaaagaaagaaagaaagaaaccctccatgtcttgctcaggctttccattatttttaaaaaccccagactttttcctacctttctccttttttatattggaacaaccaatcattctattctggtacaaaaattgactttctattttctgttataattgagaccacacaggatactttctcagacaaaaatacttttagtatacattttgtattcataattacatgtactaattagaacttttaattcttaggaacactaaattttaataaaaacttagtaattttgagctgttaaatattaacattttatgaatgtatttcataatagctggaaaatattgtaggaaacaatttttaatgtggaactgacatgtaattgattgacctatttttcctgacaaattacttgatcttagtgcttctctccctctttaacccaatagtgctcgttcatctattttggcagaaaaaaatatatgaataacatatagacaggaaaaagtataaacataaagacaaacaaaaacaaagactttatagtttttaaaaatttattttgttcttacattatatttgtacatatttatgggatatgtgtgaaatgctgttacatgcatagattgtgtaatgatcaaatcggaatattcagagtatccatcacctgagtatttatcatttctatgggctgggaacatttcaagtcttctctagctattttgaaatatacaagagtgttgttaacgatagccactatactctgctatgaaaccttagaacttattccttctgtctaacggtgtggttgttcccattaaccaacctctcttcatcccccacgccgacacacaccctttccagtctcatgtctatcatttcactctctacctccttgtgaacaacttttttagctcccacatatgagtgagaacatgggatatttgtctttctgtctggcttatttcaattaacagaatgacctccagttccattctctctttgtctcaaagagacaaagtttctttgtaatacgtcatatgtcatatatagcatatgacagtttgactatcatatgctatatagatgatctttgtggcttatacctatatggaaatctctaagcctcctgtatttcaatgtctaattctcttgctagacttggaaagttttcagctattattttgttagtgtttttatgcctttgaccttctcattttctagaatactcaaaatttgaaatacttagtctctttatggtgtcctatatgtcacataggttttgttcattcttattttttttttctctctctctctcttatctgggttatttcaaaagacttctgcttggtctagtctattgctgtgcctctcaagtgtattttttattttgtgtattgaattcttcagttccagaactttgctttagttcttttttataaaatctatctctttgatgaatttctcattcacagtttgaactgtttttctgatttttttttgttgtttatctgcattctcttttacctcactgaaatttcttaatatgataattttgaaatctttttctggcatttcatgaatttatttttattggaatttgctgttggagaattattctgatcctttgtcaaattgccttggttgttcacgtttctggtgtctttatgtagatatccatgcagctggtgtaacaatcactcctttcaatttttcattgactttcgtagaggaagactttttcctgaagatgtttctatgatgataactgggaaggatactttagctttgcacagaccatggtgaggctttcctaggaataagaacggcagctgggccagccttaggcctctgtggtagcagcagcgagccatgcatgctttccttgggcccttaagaggcatatgcaggcaccaatgttagtgagtccaggtggaccaattctcaggccttcaggcagcttgctcagatgccggcagtggcagtggtaagccagatgggtaagtagaactttgagcttccaggcagctgtaaaatcagtaacctaagattgcaccttatggaactgggaaaagaagaccaaactaatctcatagctagcagaagggtggaaataaatattagaagagagataaatagacaacagaaaaacagtagaggaaaacaatgaaataaaaatgtcattctttaaaagatcagctaaacattaataaatctctagctagactgactaaaaaataaaaaataagagaaacatgcagataacccaaatcagaaatgaaaatgggaacattctacttacttttaaagattattaagaataaagataaatttagcaattgaagtagaaagtggttaaaaagatcataaaagactgttatgaacaattgtacaacaagttagataacctggattaaatgaataaatttctagaaacacaactagcaaacgtgactcagaagaaatactaattctgaatagacctattctactatgatctgtttctactcacagcactcctgataccaagtatgtaggggtttttcccaccaacaacaaactctccaactctccagacaccaactgcttgtccaattattcagttcaatttgacatgacctgcaattagggcagctccgtaggttaaggattcagttccacaagactgccctgcacatcagacaccaatcacaagtctaggccacccatacttctgattaactggctataaatcaaggtgccgtgaaatcctataattttatgttgccttagcatccattctaaatataagctagattttcccacaccagtagtagggcttagtcacccttgacccagtttccagttctctgcctcctcacaggtcctcagtgtggtcaatccagacatttgctttatataattgcctgctggtcaccacccctctatagaggagctacatacaacctacttgcctcacccactgacccctcccccaacaacttctgcactgggcatggactgcgcaggtatgccacagtgaccacctcttggtcaccgcatgaccccatggaactcatgccgccttgctttaaatccaccagttggcctaggcgccgtggctcatgcctgtaatcccagcactttggaaggctgaggtgggtggatcacctgaggtcaggagtttgagaccagcctggccaacatggtgaaaccccgtctctactaaaaagacaaaaattagccgggcgtggtggcacgcacttgtattcccagctactcaggaggctgaggcaggagaatcgcttgaacctgggaggcggaggttgcagtgagccgagatcgtgccattgcactccagcctgggcgacgagaaaaaaacttcgtctcaaataaataaataataaatccaccaattagaattcccctccaaaatctgcttgggtaatttcccagtccctagttaaggctttagggccacatatcctccctctctgtcactccccacccactggttgcacatgcctgtcttgaatggcttcccacttcccactggccctgcaatgtgtgctgctgtcttctctcggatctgtaagtaatagatggcttctgatgtttcatacgtatgattgtgctgccttctctgtgtcttacctggccaacacactcgagcctcgcttttttcatggttagagctttcctagagagtggttatcaagagttatcttgtctgacaccaatcagacaagagccacaagggcatctgccagtataaacaagtttcctgtgagcggaacacctggccacaggtcacacacttaggcattaggcagtctgccaggataaagcagtatcccatgaaaggcacactgtaaacatccacaatcatcttccctagagccccatcagggcaggcctagaatttaagccacttttcagagagagatctgaagaccaaattagaaagaatttttacaacatgagcattctcacaactccctccttgggttcaataatttgctagaatggctcacacatctcagggaatacagtatacttattaccagcttatgttgaaggatattataaagcaggggtccccagcccccaggctgtggaccagtaccagtctatggcctgttaggaactgggctgcacaacaggaggtgagcatcgggggagtgagcattactgcctgagcactgccttcagatgagtggcaacatgagattctcatagaagcattaaccctattgtgaactgcacatgcgggggatctagggtgcccattccttaggagaatctaatgcctgatgatctgaggtagaacagtttcatcctgaaaccatcccccttctgccatccatggaaaaactgtcttccatgaaaccagtccctggagccagaatgactggggaccacttttataaagcatacaaatttatagccagatgaagaagtacgtagggtggggtccaaaagggtcagaagtgcaggaccttctgttccatggagttggattgcaccaccctccttgcaaataggtgcattcatcaacccagaggctccctggaccttgtttcaggtttccatgaaggttcccttatgtaggcatgactgactaagtcactggccattggtgattaactcaaacttttttggcccttcttccttccctggagaggaaaaaggggtgtacagctgaaagttccaaccctttaatcacatggttggttcctctggcaaggggcccaccaagagtcatctcaacaaaaactcagatatggttgaggcttaatataataacaaaagacttactcctatcactcaagaagtttcaacggttttacagtctctctgccaggaacctgggacctagatcaaacatatattttttattttatatcacaatctataacaagaaaagagagggaataattttaaaactactcacaaagaaaagggcaggatcagatatcttccttgatgatgtctatcaaacatttaaagaagagttaacaccaatctttccccaactctcccaaaaagtagaagggggaaacatttcttaatttatcctatgaagccagcattaccttttttatcaaagccagacaatgaaataacaagaaaggcaaaccacgggccaatagccctcacgcatacaggtgcaaaaatcctcagcagcatacaagcaaatcctatgcagtggcttaccaaaaggattatacaccatgaacaagtgagatttatcccaggaaaacaggaatgcttcaacatatgaaaatgaattataatgcaccacattaataagatgaagcaaaccacatggtcatttcagttgatgcagaaaaagcattttacaatattttacagcctttcatgattaaaaaaacactcaacaaactgggaatataagagacttcttcaacatgataaagagcacttatgaaaaacccacacctagcattatactcaagggtgaaagactgaaaacttaccccctaagatcacaagacaagcccagttttgacagttctattcaacactgtattagaaattctagccaaagaaattagacaagaaaaaaatttcaaatttgaaaaaagatgaaatctatctttattagcagatggatatagaaaatcctaaagaatccacacacaacaaactattaaagctaaagaataaattcagcaaagttgctgatacaagatgggcacacaaaaatcagttgtatttctgtgctagcaatgaacaatctaaagaggaaattaagaaaacaactttataatagcataaaaattataaagtacataataataaacttaaccaagaaaattgcaagacttatacatagaaaactacaaaacattgccttgacctccctcagttaccttgtgattctgtgtgttgtgttgggacaaatggggaggtgacagagagaggccaatattgtgtaaccatgtaaccagcactgacatttcctcaagaatattcccccaaagataagcctttgaactgcatagttgctgtgggtggtgtctgcacattctttattgggataatgtgtgctcttaagccagggaccccaatacccctctttagttgtgcccagagacccatccctaggaaaccctcctccagtgaaaactaccagtttcctgagtcttagcccctcactctttaccttctttctggagtcacacaatcctggaagctccatggggtccaattcactcttgagagcccataatgattcccccattctgctatgaaatcccacagcacattgcaagccctaataacatatctattcatgttgtaatgacatacataaattgacccatggacccaatgatccaggagcccatatttccacttacaacaccctctcccaaagtcatacacctctgtaatatcctaatcaaagagatatttctatgatggtaaagtaatttgaaagtaatttagaaattataaagaaaaatcgaatgaattcaggatccaagttaaatttgtgaatataggaatggaatataggctgctggggaatagcaatttctggtggggaattgagaccgcaacacaccacagttgttaccagtggagggtgtccaggttcttcgtgtcttgaacaaagaattggacaaaatgcataaattaaggaaggaataaatggatttattgaaaatgaaagtacactccacagtgtgggagctggcccaagcatagggtctcaagggccccgttacagaattttcaggagttaaataccatctagaggattccagtggttacttggtgcatgccctatgtaaataaaaaggatgaagtaaagttacaaagtcatttactcggtgtacgccctatggaggggctatttcctgtcatagctgaagtgtgaagtggccttatgtttcatgcctccagatcctatttgcctgcctcacagctaacatatgtgattcgggacagaagaaactcatagtgtcacaggacaggagtctgtcatctcccgagacccaggggactcctgaagacaacgacctcgtgtgaaggggagttctagggagaggcagatgctgacccagggaggacttcaggatagggactttcagggaagcagtaaggcctgcagaatcctaggcccaggaagaagatgcagcattcagggctgcacttgagaggcctaaaacggtgagggaggcagagctcaagagcttgactctatctcctgagtcagggatttatagggaataaggcaggggagggaagacagtgaagggactgaagtaggaaaatgactcagcagtgtgaagaggcttaattctccctgttgaaaacgagatgccctaccgtcctttttcttagaacatttactttagaaaacttgtaagcacttctctcttagacatgcatttgaatgcctccgaaaactgggtcgttcttttgccagctttatgacccagtgatgtctttctaaagaacctgggaaacttctctttgaaatgtaaacattaaggaaaatagcaccccatcccctagtttctgtgggagtgtaggagcctcgcatcaggctcttggagccttaatccaagctgcaaaacgacttcttgtcataaagtgtatgaagtttgtgtttcctctggataaagccaattacctataacagatggtcaccccaactaccaggtgaatctaggatgatctatgtgtgaccaatggggcagtcaagtcctcttacttgagaactagctattatttgccttgaagacaagtatgttctacttggctacataaaagtgcgagatttctttgcgtctttgcaatggcttagtggcttgcctgtgacgcacatcacatttgggtttaatgctttttcaaactattttctttctctaccatctttgcagagaggttttctacactgggaaaagattttgtttttaattgtgtctctccaacagcaggcagtgtctacagagcttcgaggcacaaacgtcgtttcaaggacctagcctgaggacgactttaaggggatacagatgcgcaggggagcaactggattcccagcgtctcataatgacgccgggactctcaagagaggaatgggtgtgcagattttaaagtctagaggatcccggacatcggtgcggaacactgtagaataggagtgcaagtttgaaagaggaagacggaaacccttctcactgacgcgtgacctctccatccgcttccgggtctgcgggcaatccctctcatggcagggcggggtcgcagcgtcctggaccagcgcctagaccctggctggtctcgcaatggagagggctggatccgaggtgggagccgagataggggcgggtctgggaaaggggcggagcctggccttcctagtttcgccccgccccaggaagtttcccggtctgtgggttatttttctgcccaactacatgatggtcctcatttgcagccatttgaatctctgtgatgtcttcctttttctacatagacacggtaacagtctgatctctctttccaccacaatcttacaagtgtaataaatgtggcaaatttttcagacatcgttcatacattgcagttcatcagtgaactcaaactggagagaaaccttacaaatgtcatgactgtggcaaggtcttcagtcaagcttcatcctatgcaaaacataggagaattcatacaggagagaaatctcacaagcgtgatgattgtggcaaagcgtttacttcacgttcatacctcattagacatcagagaatccatactggacagaaatcttacaaatgtcataaaggtggcaaggtcttcagtctgtgggcactccatgcagaacatcagaaaattcttttttttttttgagacggagtcttgctctgtcgcccaggctggagtgcagtggcacaatctcagctcattggaacctccgcctcctgcattcaggcaattctcctgcctcagtctccggagtagctgggattagtggtgtgcgccaacacatcacgctaatttttgtatttttatttatttttattttgtattttattttatttttgtcttcagatggagtctcgctcttgtcacccaggctggagtacagtggtgtgatgtcactgcaacctttgcttcccaggttcaagcaattgtcctgcctcagcctcctgagtaagctgggattacaggtgcctgccaccatgcctggctaatttttgtatttttagtagagagggggtttctccattttggtcaggctggtctagaactcctgaccccagctgatccacccacctcagcctcccaaagtggaaggattacaggcatgagccactgcgactgacttttttttttttttttttgagcctgttttgcagcatttacaaatatcagggttttcccacgagatcatgaagattttcacataagagatttctggccatttgtgttggtgttggcagtccaggtcaagcaggaatatgtaataacattcaagctacccacctttggccacattcctgcatttgtagttcatattttgatgaaactcagctacttgggaggccgaggcaggagaatcactggaacccagaaggtggaggttgcagtgagctgagattgcaccattgcactccagcctgggcaaaaaaaaaaaaaaaagaaaagaaaagaaaagaaacttagtctaaaaaaaaaagtcatgcctcttctcctcctctttccgtcatcgtggtgtgtgcttgactccgcttcttgccatgtcttctcacaagactttcaggattaagcgagtcctggccaagaaaagcaaaattgtcccatttcccagtggacttgcatgaaaactggcaataaggtcacaatcatgttaccatatcaagctgaaagtgtcaccactacctggagagttggacatgttttattgggaatatattttttaatctctgaatctgttatgaatgcattggttggctgggttcaataataaatatgtaaacatttcatttcaaaaaaaatgtcaaatgaagtaattcgatagagtaccttgatctttgttttgtttttttgagctggagactccactatgttcagtggatcacacctgtggtccacgcaccttgggaggctgaggtgggaggattgcttgagaccgagactcctggtaatcttctcgtctcttctaacccagtttatgacagacccttggactttactttgttatccacctgtgacccggaagccccccaattccagttattgcacctttccagaccaaaccaatatatatcttacatgttttgattgatgtattatgtctccctgaaatgtgtaaaaccaaactgcagcctaaacactttgggcacatgtcatcaggacctcctgaggctgtgtcacgggggcatttttaaccttggcaaaatagatttctaaattgagtgagacccagtagatacttttggttcacgagctcatgaacacagaaaaaatcaagagaaaaaaatctagagagaataggaaaaaaactagatgtaatggaaagcacaaaatcaggtccaaaatctgaactctttcatatgtactcaacataaggaaatgctcttcaactttgtgtgaaagatagattacgaacatttgattaaaataaaaacccattctatgtgattttagccaatttaaccctgcaaataatgatcaattatatacatacataaaacttcctaatatttcacttagtgttgctatttctatgttcttggggcagaagctcagcctgtcagatacattacaagacagtggtgtctccataattgtgcttaggactctgtgttgcatgagtggacaaactgttaagcaggaacctaggagagctagggtgtcaaagttcaagtccattaaaactagcaagacgtaggccgggcgcggtggctcacgcctataatcccagcactttgggaggctgaggcaggtggatcacgaggtcaggggttcgagaccagcctgatcaatatggtgaaaccccgtctctactaaaaatacaaaaaaaatagctgggcgtggtggcgggcgcctgtagtcccagctactcaggaggttgaggcaggagaattgcttgaacccgggaggcggaggttgcagtgagccgagatcgcgccactgcactccagcctgggcgacagagcaagactctgtctcaaaaaaacaaacaaacaaaaaaaacaaatagcaagatgtattccttactgctcactcacgagtcacggttataagatgtttacggttaaggaaagcagcttattgatacctgcaaggacaaactcctacagaaacacaatgtccagatgacccaatatcccatgacagcgtattcttttaagatagcaggctggggttgaactcctgacctccagtgatccgcccgcctcggccttccaaagtggtgggattacaggcgtgagccaccgcgctggcctgaagtggtattttttagaaaccacgtaatccttttttcagcttaataacccccatggatgtatttctgaaggacttggggtctctctttgaaaggcaaagaacaagggagacagtacccgtatctcggtaggaaattaaatatttcaaacatcaaataattccaatgtaaatgtatggatctttaaataattctgagccttgaaaggaatgtggtcatgcaagctgagtccagtggtatgcaggcgcaacttctaagagttttcctggccagacgcggtggctaacgcctgtaatcccaacactttgggagtccgaagcaggtggatcacttgacgtcaggagttcgaatccagcctggccaacgttgtgaaacccagtctctactaaaaatacaaaactattagccaggcttggtggcgcgcgtctgtaatcccagctagttggcaggctgaggcaagagaactactttaacccgggaggtgaaggttgcagtgagccgagatctcgccactgcactccagcctgggtgacagagaaatactctgtctcaaaaaagaaaagaaaagaaaagaaaaatctaaatataaaaatgaaagtaatagatctcttccacaaatgtgctgggacaactaactggatatccacgtgaaaatgaataatgttggatccctaactcacaaaatcaaaaattttatttaaagaaattttaaaaaaggagagagagagagacgaggaagggagcgctgccggaggaggtgttactttgtcgcccaggctaacttggaccccccccccggctcagcgatcctcctgccactgcttcctgagtagctgggacctcaggctttcgccccgcgcccgcatctctgctgtgtttaagcagtaggtggtgacctcactcctccctggcctgagcactccgtcccgcatcccagggggaggccctagggaaatctctgaagctgaggacagggtggactctcctttcccagtgaatggagaatagaaagggagaggatttctattctgttctgtgggccgtcagcatgaaatcgtatgttccacccaggcagggctttgcatttcacattctagtttgcatccccgtttcagacaattccagggcttttgaatcatgcctcagccttcctgtccggtctcgcctccaaagctcgaaaacaagaggcgctgggagcgaggttgagagacgcacgggtcccaccccggccccgccttctgccaattctaaaggggaaggtctctccgcttcgcgccccgcccctacctcgctcaggccccgcctacctccccgcgggtcccgcccaggcctggcttctgtcctgcgcgcgcagattcgcgcaaacccggaagcggatcgcatggagtgatggtcccaccgcagcggtgagttttgctctgtgttgtgttaagtctgcgcttcccaagtccccggcgcttctgtacctgggacgtggggtccccatagacctggaaattctcacccgtgttccttcacctagagcaaatttagacgtcctcgtcagagtccaggggtcgcttccttttgggtttaaagtcgccctgaggatggtcccttcccgaatctttctgctatagggcaatgtatacacttcccatcgcgtagtttccctgctcaaaacctttttctgactcctcccgacccgcactttttaaagtccttaccgcgaggcggattcccgcccttggcgcctcccagtcttgtcttaaggcgccgtcgccccccacctccctcctcgttccaggcccttatgctccccaggtctccccaccgcagtcaccgcttaccctgagcccgcgttggggaggtgcccggggctgtcctatgacaccgggtgttcttgcctgccctgcaccagcccctggaaaatgcgctcctccgggatgcaggcgtcttactccaaagccctcctgtgattgtgttggccaaagggatcaggagactgagagagagagcagtagaaaacctgagacagagaaaagaagaatgagaaagaccataacagatggcaaagtagaggatgagtgagggatttgccaagagagagcaaaaatgaaaaaaacaaaacaaaacaaaaaacagcaggaggagcagatcccagggaaaaagaaaacaagagctagagagagaaggggagaatgagagatatgtacagaattagggagggaagcacagtaatgaagaaaggggggctgggcgcagtggctcacgcctgtaatcctagcactttaggagactggggcagagggattgcttgagtccaggagttcaagaccggcctgggcaaaatagtgagacccccccccccatctctgtcaaaaaaaaaaaaaatttaactgggcgtgatggtgcacacctgtaatcccagctgctctggaggctgaggcaggaggatcacttgagcccaggaggtccaggctgcagtgagcagagatcatgccactgcactccagcctggtcaacagagcagagcctgtctcaaaagattaaaaggggtgggggactttgggttcagatgagtgggtgagttcattggatatgattagttgtgatatgttgacttctgtttatataatctaataacttagaacttgtttaaattatacagatgatattgagaattttaaaattcctatctataagacacatacattctgtaaatcttggcattagaggtcagcttccacttggaatccctattcagccagagggtagtgacttaattcaattgtgagagcctctcttccctcttcccatggtgaggtaggaaatggggcagtgaagtgggagaaaaaaatcactttctgttattatgtaataattttaatttaattaattaatttatagtttgagacagggtctggctctgtcgcccaggctggggtgcagtggtgtgatctcctctaactgcagcctcgacctcctaggctcaagcgatcctcttacctcagcctcctgagtagctgggaccacaggcgtgagccaccaagtccggctaggttttgtattttttttttgtagaaatggggtttcactgtttcccaggctggtctcaattctggcctcaaaggatcgtcctgccttggcctcccaaattactgggattacaggtggaattacagagaggagccaccgtgcctggcctacatagtcgttttttgttttttgtttttgtttttgtttttgtttttttgagatggaatctcactcttgtccaggatggagtgcaatggcacaatctcggctcgctgcaatttccgcttcccaggttcagactgattctactgcctcagcctcccaagtagctgggattacaggcatgagccactgcatccagctaattttgtgtttttagtagagacggggtttctccatgttggtcaggctggtctcaaactcccaacctcagatgatccacccgccttggccccccaaatgctgggattacaggcatgagccaccacgcctggcccatagtactttttaaaagggacatcagggcgtagtggctcatgcctgtaatcccagcactttgggaggcggaggcaggtggatcacaaggatcacaaggtcaggaattcaagaccagcgtgaccaacatggtgaaatcccattgctcctaaaaattcaaaaattagttgggcatggtggcatgcacctctaattccagctacttaggaggctgaggcaggagaatcacttgaacccaggaggcggaggttgcagtgagccaagattgcgccactgcattccatcctgggcgagagcgagactccatctcaaaaaaaaaaaaaaaaggaacatcaaagctgggcgtggtggctcatgcctgtaatcccagcactttgggagccaatcacctaaggtcagtagtttgagatcattctggccaacatggtgaaaccctgtgtctagtaaaaatactaaaaaagtaagctgggcatggtggcatgcatctgtagttccagctgctcgggagcctgaggcatgagaatcacatgaacttgggaggtagaggttgcagtgaaccgaaatggtaccactgcactgcagcctggggggcagagcgaggcttcatctcaaaaaaacaaacaccaccaccaaaaaatgaaagcaaaaggcacatcaaaagtgcttttgttctcgttgtgtaacatattttcttttttttctttctggttcctcttccttcctttctttctttcttttttttttttttttttttgcagttttactttgagataaatcttagttttaaatatttcttttttaatacataatcacttctgaaagatgcatttgcagcatcctataaccagctcacattgttcagttattttcccattgacatctgaatttgttcgattttttaaaaaacaatttccaaatagtttctgtttgaaattagttgcgtccagttcagatcgaggtctgcatgctttctagtctttattatttattggaaacctttaacatcaaaatgtagtttaacgagttagcctgtttttcagttttgttgtcatttgttaaaatcttgagctgtgagctattaagtgcatgtttccctcaaggcacctctggtccatgtggacaaatgttgaaagcccaactcctcactgtggctccatagccctgtgtccagggcccctgccagtgtccagcctcctcctgggagcttgccctcatcgcatgactgtctctgccccagtcatatttgcttttctcttttcccaaacactaaaacccttcctgtctcaggttgctgtccctgctcttaccctgtgttcctaaatgatcacggccctgtgcctttcttctccttcaggtctaggctcagagatgtctcccatgccctcccacccccatctgaagttccctctgcccgtcagtctctatcacgttactcagattttattatctctgcatcagtcacatcagaaacactctttttattttattttcttttttttagacagagtctcactctaccgtccaggctgtgagtgtagtctggtgaccttctctccctgcaacctctgtcttctaggttcaagcaattcttctgcctcacccttgcaagcagctgaaattaaatgtgtgtgccaccacagccagctaatttttgtattttaattttaatttaatttaatttaattttacttttgagtttcaatctgtctcccaggctggagtgcagtggcgtaatcatggttcactgcaacctcctcctcccgggttaaagtgattctcctgcctcagcctcctgagtagctgggattacagagtcgcaccaagcccagctactttttgtatttttagtagagatggagtttcaccatcttggtcaggctggtctcgaactccagaccttaagtaatccacctgccttggcctcccagagtgctagggtacaggtatgagccaccgcgcccgccccaatttttgtatttttagtagagacagggtttcaccttgttggccaggcttatctcaaactcatgacctcaggtgatccgtctgcctaggcctacccgtgtgctgggattacaggcaagagccacagtgcccgcccagagatgcctttctgcatggattattttgagtgttttgtgtctcccttctttggaggatgcacagttcccatcttggccacaggacaactgcagcacctactctggggttgtggttcagatgctgaggcgtcttcagggaagactcagggcctggggcaagtgcaaggatggtcccacatttcttctggaaatttcaattctaattgatctgaacttcctgtggctatttatttcagtcaaaataaaaggagaaggcctcactaaggtcagaaagccctacagaccagaccctgtgtcctcaggcagtgccgaggcatctccatttttgtcatctgtgtcactgcctcactccagctcccgggtctccgtgctctgtacatcaccaggacccagtttggccattatgggcaggggctttgccaccagtaggtgatgcgctcagcgtcaagggtcctggattcccttcaggaagggtggggagaaggtcagggacctgaggggcatgaaggacacactcctacacaactagttctgttccggagcagctggaggctccgtgactttaggaaagattcttccaagaatcaagagtgcaaacagcaccgtgaactgcagcccgagggccacctcctcctgccaggccagtggtgatgacgctctactggcttttccttgcctgtcacaacacgtgagcacacacacacacacacacacacacacgcacacacacactcccacacacacagtcacaaggcagctggggagtcgaaggtcaagatgctataatgtaaatgtgtggccgtgtgtggtggctcacgcctgtagtcctacagctttgggaggctaaggcaggcagatgatgaagtcaggagttcgagaccagcctggccaacatagtgaaatcccatctctactaaaaaaaaaaaagaaagaaagaaagaaaaaaaaatgagccaggcatggtggtgcacatctgtaatcccagctactcgggaaactgaagcaggagaatggctcgaacctgggaggcagaggttgcagtgagccgagatcgcgccattgcactacagcatggtgacagagcaagactccatctctaaataaataaataaatgtgctataatgtaaatgtggagcacaaatattttttccacaaagaggggccactggttcctgggaagggagtttgagggttatagccctggtcatggccagaagacttaggaactggaggaaggaaaagctgtatttatcctcacaggatgctcctgtgaacagatgggctgatctaatggagtgacatttagaaaaaggggtttttctctccacccagcacacaccgtcacccaccctatgcacagtcctccctttcccgttgtcttctctagaatgacaaagttgatgcttccccaggtgggcgtctgagggaggggagtggtttccctgcctgtccttgatcccctccctcaagtcttccaccttcgtgtccgctgttctgttctgacactcattgcctgcaattctatcggtttgcaccatcccaagacccaactaagacccaaggatttgagtctgggaatatttaagccaatgtcattgccaagtcagaagtcttagaccccaggaatttttcttcattgagagtctgggcagccaggaagcctctcctctttctgcagagttgaggtcaaccaggaccctggcacatgtgagaccccagaggggacatactagtatcactcagtcattctcattcattcactcactcagtagctatgaagctatagtatatgccaggggacacaaatagaggtgctgtctgtgccagggatcaaaatgttaaaccaacagactatccttccctgctttatccaggttatttttcatttttatttatttgaggtggagtctcactctgtcacccaggctgaagtgcagtggtgcgatcttggctcactgcaacctccaacctctgggttcaagcgattctcgtgcgtcagcctcccaagtagctgggactacaggcacacgccaccatgcctggctaattatttgtttatttattttgagacagagttttgctcttgtgtcccaggctggagtgcagtgccgtgatcttggctcactgcaacctctgcctctggagtttaagcgattctcatgcctcagcctcctgagcagtggcgattacaggcgtgtgctaccatgcccagctaatttttgtatttttggtagagacagggtttcaccatgttggccaggctggtttcgaacttctgacgtcaagtgatctgtccgctttggcctcccaacgtgctgggattgcaggtgtgagccactgtgcccagcctcatctcgtggctttaaactttacccccatggccccatggcccctgcagacctctcccctgaacgctacagtcctgtgtccagttgactccttaactctctgctgggaggatgaacaggcatctccaccttcatgtgtccaaaggtgacttcccgaacttccgtaaacgcattcccccatgctcctgcccttctcagatgagggtgaccttgtgcttcctaggatatcactaaaatctcagcatgcttttaaaatgtaaaggataattacattgtttataagggttttaatttgtaatataaagaaaaaattacatgtttactcacaatgggtgaagaaattcatcattttaaaaattctttggaggtgtgggagaaaaatgttagaagacctcatccctgcctgatctgccctcccaggtcctctctgacctcatctgtttcccgtgtcctcctccctccctctgctccagccatgcaggcgtctttcctgttcctgggccgaggttgctcctgcctcaaggcgttcatgtgggctgtccctctgctggaactcgctggcccctcagctgcaggtgcaaacacccctccttccccaggtctctgttctgatatcaccttctcagtggggacttctgtgacccacctcccatttcacactccagctacaccctcaccccctcctctggtccatattggctgctctgcatgcttctttctgttttttcaccttccactgcctgtaggagtttatcgtccctggtacagtgggcagcagaggggaccatatttcctcagggtgaggtctcctttgtatgtttcattgtgttaacggagggggtgtgttgattctgagcaataaacaacatatttttaacattcaggattgacttctaaagactcttggtacgtgaggaagaaacccggaagaggaagaggaaagcaaaggagtcagggatggctctttctcaggtgagatgatatgttgggtggattgttctgtctccttcctctcagaaatcctgggccttggagttgggaatcttctctgagtctgaagcatcctgcctgacaggtttgctcgcactcacccatgccttccctcagtccctctcatctcgcttagattccatctcttgtgacacagtgacatcaacttgggaagaggccgcactgggcatggtcctgggaagggctcacaccgagacatggatggagatgggatgagggccccatggtgtcagtgctgttgggcagcagggattgttcaggggccacatctggatgcactgtcagctctctgtgaaccaggattagagcagctgccaatggaagtcatgtattcatgtgcacaaagtaggtggtaaattctagaaaaggtgaccaataaggggaaacgttttctgcctgattttatactacatttttagttttttgagtgagttactgtgtttctgactccaaaaatcttagtaattagaatggaaagttcatacacagacatgaatgatagaagatgttttattccatcatttctttaagaataggaaatcaacctgaatcatagcaggagattcattcaaccattcttagcacattaaagctcatggagactgtggggttactgcggagaggcttgtgaaacaggtgttttcaggaaaaatggttataatttttctcaaatatgggagcagtacttcatttttatcctagaggatggtgccatattctcattccacctattattatttttatattattataatattattatattttaaatatacaaagtcttgctttgtcgcccaggctgaagtgcagtggcatgatcttggctcacggcaacctccacctcccgggttcaagagattctcctgcctcagcctcccaagtatctgggattataggcacgcaccaccacacccggataatttagttgcatttttattagtgacgggctatcaccatgttggccaggctggtctcaaacttctgacctaaggtgatctgcctgcctcagcctcccagagtgctgggattacaggcatgagccgtgcccagccccaccaattattattaaatatatatttttatatgtaaacatcacatgatatatttatttgttttctggtaaaactcgaaggaaagctgcagcttagacccattgccataaagcatctcttttccctgtcacgtcctccaccctccttccagcctcattgtggagccgctactgtcagttctgtgccatgggtcagagcaaatctcgcgcgtctgtatttctgcatcgttacgagactttagaaaaaattctgcggtaaatttaaaaaatatatatttatggttttactttaggtttggggcgccatgttcaggtttgttacataggtaaagtagggtcatcagggtttgttgtacagattatttcatcactctgctattaatccccgtatccaatagttatttatttatttatttattttttgagactgagttttgctcttgttgcccacgctggagtataatggcatgatctcggctcactgcaaccactgcctcccaggttcaggcgattctcctgcctcagcgtcccgagtaggtgacattacaggtgcctgccaccactcctggctagtttttgtattcttactagagacagggtttcaccatgttggccaggctggtcttgaactcctgacctcaggttatccacccaccttggcctcccaaagtgctgggattgcaagcgtgatccaccgcgcccagcccccaatagttattttcttctagtcctctccttcctccccgcctccaccctcaagtagaccccaatgtctgttgttttcttctttgtgttccagtaaatattttactttgatatttgatcctactggttgtgaaaatttacatgttgtcatgttagttaacatggctagcttgccctttgacatctgcattagaaattgactggatgacctgtgtgttctttgcaatttttccctgtataaagagtgccatagtggctgcctctgtgcacacctgcgttactacagatacctgaagattcctccaggtcaggcggttgaaagggtgattgcttcttctaggatggggcattccctgttttcttagatctgacaagattcccccctgcccccacctgccaatgtatcctcttctaccaagatgtgattcttcttaagttaaacaaaacttgccactttttatatttttaaaacctttctatatatgcacacccacctacacaagtatacacacacacatgcatatacatacatatatacacacacgtatatattttgaacatcttttattttttgaatatctgggggaaatgacaatcctttgtattaacatctagttttttgtgagtctgtgtaggttttattattttgtggacatatgtatatataaaatggattttcatactttgagtcatctagttttcatgtattttcttttattttgagactgggtgtcactgtgctgccgaggctggagcacagtggcgcgatcttagctcactgcaacctccaccctcaggctcaaaccatccttctacctcaggctcccaagtagctggaaccacaggtgcctgccaccatgcccggctgattttttttttttgagatggagtctctgttacccaggctggagtgcaatggtgagatttaggatcactgcaacctctgcctcctgggatcaagcaattctgcgtcagcctcctgagtaactgggataacaggcatgtgccactgtgccaggctggattttagtttctgatcctgatctttcactgcggacgttgtcatctctgaagacatcactcataccctgtctcatctagatactgaatgtcacttgcattgtcagtaaaagtttctgggccaggcacggtggatcacgcctgtaatcctagcactttgagaggctgaggcaggcagatcatgaagtcaggagttttgagaccaacctggccaatatggtgaaaccccgtttctactaaaaatacaaaaattagctaagaatagtggtgcatgccaggaatcccagctcctcaggagactgaggcaggagaatcacttgatcctgggaggtggaggttgcagtgaactgagatggcacctttgcattccagcctgggtgacagagcgagactctgtctcaaaaagaaaaaaaaagtttctaacatttctgtaacgagaaccctacattgatttttattttattttatttattttattttattttattttattttattttattttattttgggatggagtttcactcttgttgcccatgctggagtgtaatggcacaatctcagctcaccacaacctccgcctccctgcttcaagcaattctccttccacagcctcccaggtagctgggattacaggcatgtgccacaacgcctggatgatttttgtattttttcttttttagtagaaacgggatttctccatgttggtcaggcaagtcttgaactcccgacttcaggtgatctgcctgcctcagcctcccaaaatgctgaaattataagcatgaggcactgtgcccggctcctgcattgatttcttttgtgtgtatttttagtattatccacaaacatcagaaattcatactgagagggtattgtgacctcttcaaaaggtataagaaggccggtgtggtggctcatgcctgtaatctcagcactttgcgaggccgaggcaggtggatcacgaggtcaggagttcgagatcagcctgaccaatatggtgaaactccgtctctactaaaaatacaaaaattagccaggcgcggtggcaccagcctgtaattccagctactcatgaggctgaggcaagagaattccttgaacctgggaggcagaggttgctgtgagccgatatcgtgccactgcactccggcctgggtgacagagcgagactccgtctcaaaaagaaaaaaaaaaagaagtgtaataaaacacaactcagaagacaaaatgtggtgaagaatcccttactcggatttgtcagaacattcactacaattaaatccatgctttcctctctcctcttctcatttcgtgtaaagataagaactcctcccataaccatttccttaaaatgtgttttcatttcagggtctattgacattcagggatgtggccatagaattctctcaggaagagtggaagtgcctggaccctgctcagaggactctatacagggacgtgatgctggagaattataggaacctggtctccctgggtgaggataacttccctccagaagtggggatgtgcccttgtgtatctttgtattttctcttttttttagatacaatgtcttgctctgtcacccagggtggagtgaaatggtgtgatcatgtcttactgcaatcttgaattcctgggctcatgtgattgtcccacctcagcctcccccagtagctggtacaggtgcatgccactatgccgggctacttttttagtttttttttttttttgtagttgttgtttttgtttttgtttacaaacaaggtcttcctgtgttgttgaagctggtcttggtctcctgggctcaagagatcctccttggcctcctgagtagctgggattacaggtgccaacccccatacctaattattggtttttattttttaaattgtagcatatgtgtgtccttagggtttatatgagttttctttggacaacatgtagttggttcctgttgattgagccagtctttgccttctgagtgcagagttaaatatttacatttgaagtattactgatggagaagaccttaccgttgtgtttctgtttcatgttatctgtatctcttgtaggtttttttggttattcatttctcatttattactttttgcgtttaattgcttttttgtgtagacatgctttgactcccttcttattgacttttgtttatgatggagtctcactctgtcgccaaggcagcagtgccgtatgtgatcttggctcaccgcagccggcttcgctctcgtgctcaaaaaattctcgtgccccagtggctcatgcctgtaatcccggcactttgggaggccgaggcaggcaaatcacctgaggtcaggagctcaaaaccagcctggctagcgtggcgaaattctgtctctactaaaaatacaaaaattagccagacacgatggtgggtgcctgtaatctcagttactcaggaggctgacacaggagagttgcttgaacccgggaggcggaggttgcagtgaaccaagatcatgccactgcactagagtctgagagacagagcgacactctgtctcaaaaaaatattttcatcacctgtgaaaactattctttctccactagaactctttgttctttatgttagaattatttctgtgtgtgttgcattttcaatatcacgtacagtgttttctcatgctgttttcctctaaataataggaaagttgtgttatgaagaaaaggtacacttatacaagtttctgtgtctatccttttatttgcttatttatttatttatttgacgaagttttgttctgttgcctaggctggagtgcaatggcacaatctcaggtcactgcaacctccgacttctgggtttaagtgattctcctgcctcagttttccgagtagctgggattacaggcctgtgccaccatgcctggctaattttgtatttttagtagagacagggtttctccttgttggtcagactggtctcgaacttctgccctcaggtggtgatccgcctgccttggcctcttaaagtgctgggattacaggtgtgaaccaccgcgcccagcttatctgtctttttatttacctttactggagaactttttgtatatttgtgggttggagttactctttagacttctttcatttctttctttcttttttttttttttctttcttgagaaggagtctgtctgttgcccaggctggagtgcagtggcgcagtcttggctaactccaacctttgcctcccaggttcaagtgattctcctgcctcagtctcccaagcagctgggactacaggcacatgccaccacacctggctgtttttttttttttttttctgtagagatggggtttcaccgtgttagccagaaaggtgctgaaaggatggtgctgatctcctgatcttgtgatcctcctgcctcagcctcccaaagtgctgagattacaggcatgaaccaccgtgcccagccagcctcacagtttttaaaacatgttattgttattagattggcttcaagtattgcaatagtacagtctctaaacttcctttgtttaataagatttgtcagccttcggtgatgttgatgatgagatgttcctgttcctgtctcagtcatttcactgtcctctcagaaatagcttagactggccagccaaggtggctcacacctctaatcccagcagtttgggaggcagaggtgagtggatcacttgaagtcaggagtttgaaaccagtctggccaacatggtgaaacatgaaatctactaaatacaaaaaattggccaagtgaccccacagactcacgcctgtaatcccagttctttgggatgctgagacgggcggatcacctgagttaaggagtttgaggccaccctggccaacgcggtgaaatcccgtctccactaaaaatacaaaaattagctgggcatggtggcgggcacctgttatcccaagtaactcgggaggctgaggcaggagaatcacttgaacccaggaggtggaggttgcagtgagccgacattgtgccacttcactccatcccgggtgacagagtgagactccaggctgaggtgggagaatctcttcaggcaggagaatcatgccactacactacagcctgggtgatagagcgtgactcaatctcaaaaacaaacaaaaaaggtagtagcttaaactgggaggcttacggcacagatatttatttctcatgaatttggaaagtgggaaatccaagagcaaggtgccagccacattggttcctggtgagagcattcttcatggtttagcccagccatcttcctgctgtgtcctgacatggtggaaagaggaacaggaaacgagctctttaatatctctttttataaaagcactagtcctattcatgagtagtcaacacccatgaccaaattctctcaaaggccccatctgcaggaacatcctattggagaataagaactttgaacctggcttttggccaataagaacattcagaccagggagcctgcatcatcttgttaatgtttttattgtgcaatttgttatatacaatgttttctctgatctcagtttataaattttcccagtacacattctatgttttatattagtgcatagtgaactagataactaaggccaatgcttatatatggaattgctgtattgcctggctgtttcataaatgtagttgtgacatcgtagttgcaccttctgacattgttagtcaatttttttttttttttttttttttttgtgagacagagtctcaccctgtcacccaggctggagtgcagtgatgcgatctcgtctcactgcaacctccaccgcctgggttcaaacgattctcctgcctcagcctcccgagtagttgggattacaggctcccgccaccatgcccagctaattttttttgcatttttagtagagttagggtttcaccatattggccaggctgctcttgaactcctgaccttgtatccacctgccttggactcccaaagtgctgggattacaggcatgaaccacagcgcccagccgttagtcacttcttattccttataatgctgtgtgtttttttgacctcgtacatcagaaggtaatgatcttaacatgtatttcagttcttatattgtatgctgctggtaagtagaaattgtggctttttttctgttttttgtttttgtttttgttttgagacagagtggcgcgatctcggctcactgcaagctccacctcctgggttgatgccattctcctgcctcagcctcctgagtagctgagactactgccacccgccatcacacccggctaattttttttttttatttttagtagagatggggtttcaccttgttagctaggatggtctcgatctcctgacctcatgatctgcccgcctcagcctcccaaagtgttgggattacaggcgtgaaccactgtgcccggctgtggcttttttcttaataggaaattgtttagaattctgcaggctgtataaatgtacttattatttgcttgctgattttatgggttacgttattttactaattaatttttatgattttacataaggcttttcggtatgtggtatgcaatataactgacacagtccactcgttaatgtcacaaagtgctgcctggcactatggctcacacttataatcccaggagtttgggaggctcaggcgcctaaattgcttgagtctaaagttcgaggccagcctgtccaacatggtgaaaccccatctttactaaaaacacaaaaattggccaagcatggtgatgcatgcctttaatcccagctactcaggaggctgaggcaggagaatggcttgaacccagcaggcggaggttacagtgagacaagactgggccattgcactccagcctgttgtgatggagtgagacttcatctcaaaaatataaaaatacaaacaatttcttaaaatgtcacaacttgccttttctgcatgaatataagtaattttataacagttattcagaaaaatattgtattaactttttaatttttttttcgagatggactcttgtcacccaggctgaagtacagtggtgcaatctcagctcactgcaacctctgcctcttgggctcaagcaattcttgtgcctcagcctcctgagtagctgggactacaggcatgggccaccacgccttgcttaattttgtaatgttttcttatcttctcagtgctatgattgtttgacaatacagaatttccattgattttggttatccttacatgagcttgttgtggattatttaccaatatagtatattgtgtggtcttttagcatttatttgtatatagtaaatatgctgtaaatatgaagaatatatgcttttctcctcattgatgtgacagtgatatgttttttgcaaagtcttatacactttagggtcacagtggaaaaatactccttactttaggcttatatacatttgtgtgctgtcagtgttttgacatgatattggaaataggcttccatagaaatgatttcaagtacatgtaatcgccctttatttattgatgaatcttacccttttgcgttcctaaactttcaagataatgtttgggaagtttaaaataagtattgtttttagtgtcacatttacacatttcagtattatttaccatctatacttaagtggaaacctattggtgtttatattttctagatatctcttccaaatgcatgatgaaggagttctcatcaacagcacaaggcaatacagaagtgatccacacagggacattgcaaagacatgaacgtcatcacattggagatttttgcttccaggaaatggagaaagatattcatgattttgagtttcagtggaaagaagatgaaagaaatagccatgaagcacccatgacagaaatcaaacagttgacgggtagtacaaaccgacatgatcaaaggcatgctggaaacaagcctattaaagatcagcttggatcaagctttcattcgcatctgcctgaactccacatgtttcagaccgaagggaaaattggtaatcaagttgagaagtctatcaacagtgcttcgttggtttcaacatcccaaagaatttcttgtaggcctaaaacccacatttctaagaactatgggaataatttcctgaattcttcattactcacacaaaagcaggaagtacacatgagagaaaaatctttccaatgtaatgagagtggcaaagcctttaattatagctcagtcttaaggaaacatcagataatccatttaggagcgaaacaatataaatgtgatgtgtgtggcaaggtctttaatcaaaagcgatatcttgcatgtcatcgtagatgtcacactggcaagaaaccttacaagtgtaatgattgtggcaagaccttcagtcaggagttaacccttacatgccatcatagacttcatactggagagaaacattacaagtgcagtgagtgtggcaagaccttcagtcgaaattcagcccttgtaattcataaggcaattcatactggagagaaatcttacaagtgtaatgaatgtggcaagaccttcagtcaaacgtcataccttgtgtaccatcgtagacttcatactggagagaaaccttacaaatgtgaagaatgtgacaaagctttcagtttcaaatcaaaccttgaaagacataggaaaattcatactggagagaaaccttacaagtgtaatgaatgcagcaggacctttagtcggaagtcatcccttacacgccatcgtagacttcatactggagagaaaccttataagtgtaatgattgtggcaagaccttcagtcagatgtcatcccttgtataccatcgtagacttcatactggagagaaaccttacaaatgtgaagaatgtgatgaagctttcagtttcaaatcgaaccttgaaagacataggagaattcatactggagagaaaccttacaagtgtaatgattgtggcaagaccttcagtcagacatcatcccttgtataccatcgtagacttcatactggagagaaaccttacaaatgtgaagaatgtgatgaagctttcagtttcaaatcaaaccttgaaagacataggataattcatactggagagaaactttacaagtgtaatgaatgtggcaagacctttagtcggaagtcatcccttacacgccattgtagacttcatactggagagaaaccttaccagtgtaatgagtgtggcaaagcctttcgtgggcagtcagcacttatttaccatcaagcaatccatggtatagggaaactttacaaatgtaatgattgtcaccaagtctttagtaatgctacaaccattgcaaatcattggagaatccataatgaagagagatcgtacaagtgtaatagatgtggcaaatttttcagacatcgttcataccttgcagttcattggcgaactcatagtggagagaaaccttacaaatgtgaagaatgtgatgaagctttcagtttcaaatcaaaccttcaaagacataggagaattcatactggagagaaaccttacaggtgtaatgaatgtggcaagacctttagtcggaagtcataccttacatgccatcgtagacttcatactggagagaaaccttacaagtgtaatgagtgtggcaagaccttcggtcgaaattcagcccttataattcacaaggcaattcatactggagagaaaccttacaagtgtaatgagtgtggcaaggccttcagtcagaagtcatcccttacatgccatcttagacttcatactggagagaaaccttacaaatgtgaagaatgtgacaaagttttcagtcgcaaatcaagccttgaaaaacacaggagaattcatactggagagaaaccatacaaatgtaaggtttgtgacaaagcttttgggcgtgattcacacctggcacaacatactagaattcacactggagagaaaccttacaagtgtaatgaatgtggcaagaacttccgtcacaattcagcccttgtaattcataaggcaattcatagtggagagaaaccttacaagtgtaatgagtgtggcaagaccttccgtcacaattcagcccttgaaattcataaggcaattcatactggagaaaaaccttacaagtgtagtgaatgtggcaaggtttttaatagaaaagcaaacctttcacgtcatcatagacttcatactggagagaaaccttacaagtgtaataaatgtggtaaggtttttaatcaacaagcacaccttgcatgtcatcatagaattcatactggagagaaaccttacaagtgtaatgagtgtggcaaaaccttccgtcacaattcagtccttgtaattcataagacaattcatactggagagaaaccttacaagtgtaatgaatgtggcaaggtttttaatcgaaaagcaaaacttgcacgtcatcatagaattcatactggaaagaaacattagaaatatgaagaatgtgacaaagtttacagttgtaaatcaagtcttgaaagacaggagaattcatactggagagaaagcttacaaatgtaagagtttgtgacaagaatcttgggcgtgattcacacctggcccaacaaactagaagtcacactggagagaaaccttacaagtgtactgagtgtggcaaagcctttagtgggcagtcaacacttattcaccatcaggcaatccatggtatagggaaactttactaatgtaatgattatcacaaagtcttcagtaacactacaaccgtttcaaatcattggagaatccataatgagagattttgaaagtgtaataaatgtggcaaatttttcagacattgttcataccttgcagttcatcggtgaactcatgctggagagaaaccttacaaatgtcatgattgtggcaaggtcttcagtctagcttcatcttatgcaaaacaggagacttcatacaggagacaaacttcacaagtatgatgattgcagcaaagcctttacttcacgttcacacctaattagacatcagagaatccatactggacagaaatcttacaaatgtcatcagtgtggcaaggtcttcagtctgagatcaccccttaaggaacatcagaaaattcatttttgagatgattgttccaaatgcaatgagtatagcaaaccatcaagcattaattggcattagagtcaattcagcattgacttgagtttgaattgacttaacattgagttcaagcattaattgacattaaagtgtttatgttaagaagattgggccaggcggggtggctcacgcctgtaatcccagcactttgggaggccaagaccaatagatcacttgaggtcaggagtttgagaccagactggccaacagacatgagtcacttttcccaccctgtattttgtttctttaataaaaactgttacgggtttttatgggtatctgttgaatctaaatcacatttgtttgtataatcattcaacaatattaagacttccaatccatcaatatgggttgtatgtctatttagtttttttgatcaatgtagatttcaaggtacaagcttctcacctccttaattcagtttatttgtaagtattaagtttcatagcaaattgaagtgtgttcataagtttctttaaacattatttattgttaatgtaaggaaattcaactaattttgggtgctgattttgtattctgcaaatacattgagtgggtttattagtatcagtaaaatcttggttgattctttgtgattttctttcttttttttttgagacagtctcactctgttacccaggctcttttctttttttttgagaaggagtctcactcttgtcacttggactggagtacaatggcacgatcttggctcactgcagcctctgcctttcgggtttaagtgattctcctgcctactaactgagattacaggtgcctgccaccatgtccgtataatttttttgtatttttagtagagacggggtttcaccatgttgaccaggtttttcttgaactcctgacttcaggtgatccgcccccatcagcatcccaaagttctgggattacaggtgtgagccaccgcacccagccagtgattttctatatagaatgtcgtatcatctacaaggaaataatttttttttttgagacaatgtctctctctgtcgccaggctagagtgccgtggaatgatctttgctcactgcaacctctgtctcccacgtccaagcaattctgtctcagcctcctgagtagctgggactacaggcgcatgtcaccacacctagctaatttatttattttttttattttagtaaagacggggtttcaccatgttggcccagatggtgggccaacatggtgagtaccttgaagagaacttgaaagaatatgttagatcgcctaacctcattatccgcccacttcggacttgcaaattgctgggattatgggtgtgagccatgagcccggccccaacaaatgtaattttacttctgtctttctgatttggatgagttttatttcttttgctatttaattgctctgcctaggacagccagtatttattgaatatcaggggtgagagcattcttgcatcatgtgatatcctacaggaaaaccattccattttccttcattggttatttcagctgtggtcatttcatggatgatttttatatttttgaggtaaaactctacctatattgtttaggatttttacgaagaatgaatattgagttctgtgaaatgctttttctctatctattgagataatgtgttttttatctgtcattctgtgcaagtgtgtatcccattgatttgagtatgttgaaccatccttgcatcccatgaataggtagcacttggatgtttacaatccctttttatatcctcttgaatacagtttgctagtataagggtcttcaagaagttcatggaaaaatacatattatgaaaaatttgtgcataaatttcacactttttgtaccaaaataaaccagtataaacttgttataacgtctgaacaggctctagtttgaggcactcagaaggataagacatcagtttgaaaagaacctctatcacagcaatacaaattctgttaaaacaagaagaaacatcaaatttacgatgagaccagacgcagtggctcaggcctgtaatcccagcggttttagaggcccaggcaggtgggtgacgtgagcctagggattcaagaccagcctgggcgacataggggacctcttctctgctaaaagtaaaaaaagtcagccaggtgtggtggtgcactgctgtggtcccagctactctgggcactgaagtgggaggatcagttgaagcagggattttgaggctgaagtgagccctgatctcaccactgcactccagcctgggtgacagagctagaccctgtctcaaacaagcaaataaatgagaggcataattcctcctttgagaataaaggaaaagatttcccttccttttgtctcttttctcaggacgtttatttagaaaatttgtaaatgaggccgggcgtggtggctcacgcctgtaatcccagcactttgggaggctaaggtgggcggatcacgaggtcaggagatcgagaccatcctggctaacacggtgaaaccccgtctctactaaaaatacaaaaaattagctgggcgaggtggcaggcacctgtagtcccagctactcgggaggttgaggcaggagaatggcgtgaacccaggggggcggaacctgcagtgagccgagatcgcaccactgcactccagcctgggtgacagcgagactctgtctcaaaaaaaaaaaaaaaaaaaaaagaaaatttgtaaatgtattttctctgtcttcagaagtggtattttttagaaacaataaaacttgttttcatcttagtggtgatccaggggtgtttttctaaaggacttgggagttctgtctttgaaatgccaacaacaaaaaagatagtacatctatctcagtagtaaattaagtaattcaaaatgaagctgggtgcggtgcctcacgcactttgggacagtgaggcaggtggatcacctgaggtcaggagttcgagaccagcatgaccaacgtggtaaaaccccatctctgagatacaaaggaggttgcagtgagtggaggttgcaccactgcactccagcctgggcaacaagagtgaaactacttctcaaaaaaaaagaaaaaaaaatcaagtaattccaatttaaagctgttggacctttaaataatcctactttttttttttttttgagatggggtacccctctgcatcacaggctggagtgtggtggcctaatgtcagctcactgcaacctccacctcccgggttcaagtgaatctcctgcctcagcctccggagtagctggtattacaggcatgtgccaccacgcccaactaatttctgtatctctagaagagatgggattttgccatgttggtcagcttggtctccaactccagacctgaagaaagtgatccgtctaccttgacctcccaaagtgctgggattacaggcatgagccactgcctccagcctcttcttttttttttttttgagatggagtttctcttgttgcccaggctgaagtgaaatgatgctatctcagctcactgcaatttctgcttcccaggttcaagcaattatcctacctcagcctaaacctaccaaaatcaaaatggctaggagagtgacctgtggtcgtcctcactgctacacccccaccagctccatgacagtttaaaaatgccatggcaacgtcagaaagctacgctataaggtctgaagaggggaagcatgaataattcaccccttgtttagtagatcattaagaacctcactcatccctggcctgcgtactctgtcccgcatcccaggcggtggccctagggaagtctccggagctgagcacagggtggactctccctcccgagtgaatgaggaatagggagaggatttctactctgttctgtgggccttcagcataaaattgctctttccacccaggcagagatttgcattttacattctagtttgcatccccgtttcaggcaattccagggcttttgaattatgcttcagcatcccgggcgggtctcgcctccaaaacctggaaaacacaggctgcagagcgaggcggagcaaattgtaggccccgccctgcccagcccagccccgccccgccccggggatccctaccccgcgggccacttatccacttccgtgccacgccccttgcccttcgcgccccgcccttcctcgcccgggccccgcccaccttatcagggttcctcccaggcctggctcctgtcctgcgcagattcgcacagacacggcagcggatcacctcagtgaaggtcacactgcagcgcctgagtttggctctgtctctagttaagtcggcccttcgcaggcccctggctctgctatacttgggacgtggggtccccagagacctggaaattcccacccccttttctccaaatagagcatattgagacttccctgtgagggtctgcaggtcgcttccttttggggttttttttgcagagacagagtctcactctgtcgcccaggctagagtgcggtggcgcaatcttggctcaccatgacctctgcagcccaggttcaagcaattctcctgcctcagcctcctgagtagccaggactacaggcacctgccaccgtgcctggataatttttgtagtttttggtatagacagggtttcaccatcttggccaggctggtcttgaactccttgtcaggcctctgagcccaagctaagccatcgtatcccctgtgacctgcacgtgtacatccagatggcctgaagcaactgaagatccacaaaaaagtgaaaataaccggttcctgccttaactgatgacattaccttgtgacattccttctcctggacaatgagtcttagaagctccccactgagtaaaaggatattaaccccagaggcaacaaaagaaattaaattagtggaagaaaaaattcagtcagcacaaataaatagatcccttagtctcactccaacttttgatttttgctactgcacattctccaacaggcatcattgttcaaaatactgatcttgtggagtggtcattccttcctcacagtacaattaagacttttacattgtacgtggatcaaatagctacattaattggtcagaaaaggttatgaatagtaaaattgtgtggaaatgacccagacaaaatagttgttcctttaaacaaggaacaggttagacaagcctttatcaattctggtgcatggcagattggtcttactaattttgtgggaattattgataatcattacccgaaaacaaaaatcttccagtttttaaaattgactacttggattctacctaaaattaccagacataaacctttagaaaatgctctgacagtgtttactgatggttccagcaatagaaaagcagcttacacagggccaaaagagcgagtcatcaaaactcaatatcaattggctcaaagagcagagttggttgcagtcattacagtgttacaagactttgatcaacctattaatattgtatcagattctgcatatgtagtgcaggctacaaaggatgttgagacagctctaattaaatatagcatagatgatcagttaaaccagcagttcaatttattacaacaaactgtaaaaaaaaaagaaatttcccattttatgttactcatattcgaggacacactaatttaccagggcctttaactaaagcaaatgaacaagctgacttactggtaccatctgcattcataaaagcacaagaacttcatgctttcactcatgtaaatgcagcaggattaaaaaacaaatttcatgttgtagggtccagccccatagggtcggtgggtctctccccatgtgcagagatgagagagtgtagaaataaagacacaagacaaagagataaaagaaaaggcagctgggcccgggggaccactaccaccaatgcacggagaccggtagtggccccaaatgtcgggctgcgctgttatttattggatacaaagcaaaaggggcagggtaaagcgtgtaagtcatctccagtgataggtaaggtcacgtgggtcacgtgtccactggacagggggcccttccctgcctggcagccgaggcagagagagagaggagacaaagagaaagacagcttacaccattatttttgcatatcagagacttttagtactttcactaatttactactgctttctagaaggcagagccaggtgtacaggatggaacatgaaggcggactaggagcatgaccaccgaagcacagcatcacagggagacggttaggcctccggataactgcgggcgagcctgactgatgtcaggccctccacaagaggtggaggagcagagtcttctctaaactcccccggggaaagggagactcccttccccagtctgctaagtagcgggtgttttcccttgacacttatgctaccgctagaccacggtccgcctggcaacgggcgtcttcccagacgctggcgtcaccactagaccaaggagccctctggtggccctgtccgggcataacagaaggctcgcactcttgtcttctggtcacttctcactgtgtcccctcagctcctatctctgtatggcctggcttttcctaggttatgattatagagcgaggattattataatattggaataaagagtaattgctacaaactaatgattaatgatattcatatataatcatgtctatgatctagatctggtataactattcttgttttatattttattatactggaacagctcgtgtccttgctctcttgcctcagcgcctgggtggcttgccgcccacagatgtcacatggaaacaggcaaaaaatattctacaacatggtacccagtgtcaagtcctacacctgcccactcaagaggcaggagttaatcccagaggtctgtgtcctaatgcattatggcaaatggatgtcacacatgtaccttcatttggaagattatgatgtgtccgtgtaacagttgatacttattcacatttcatgtgggcaacttgccagacaggagaaagtacttcccatgtgaaaaaacatttattgtcttgttttgctgtcatgggagttccagaaaaaatcaaaactgacaatggaccaggatattgtagtaaagctttccaaaaattcttaaatcagtggaaaattacacacacaacaggaattccctataattctcaaggacaggccatagttaaaaaaaactaatagaacactcaaaactcaattagttaaagagaagggggagacagtaaggagtgtaccactcctcagatgcaacttaatctagcattctatactttaaatgttttaaacatgtatagaaatcagactactacctctgcagaacatcttactggtcaaaagaacagcccacatgaaggaaaactgatttgataaaaagacaacaacaataagacatgagaaatagggaaggtggtaacttgggggagaggttttgcttgtgtttcaccaggagaaaatcagcttcctgtttagatacccactagacatttaaagttctacaatgaacccatcagagatgcaaagaaaagcacctccacggagatggaaacaccacaatcaaacaccatcgattcacaaggtgaacaaaatggtgatgtcagaagaacagatgaagttgccatccaccaagaaagcagagccgccgacttgggcacaattaaagaagctgacacagttaccaaaaaaaagcctagagaacacaaaggtgacacaaactccagagaacacgctgcttgcagctttgatgattgtatcaacggtggtaagtctccccttgcctgcaggggcagctgcagctaattatacctactgggcctatgtgcctttcccgcccttaattcgggcagtcacatggatggataatcctattgaagtatatgttaataatagtgcatgggtacctggccccacagatgatcgttgccctgccaaacctgaggaagaaggaatgatgataaatatttccactgggtatcgttatcctcctatttgcctagggagagcaccagcatgtttaatgcctgcaatccaaaattggttggtagaagtacctactgtcggtaccaccagtagattcacttatcacacggtaagtggaatgtctctcaggccacaggtaaattatttacaggacttttcttatcaatgatcattacaatttaggcctaaacaaaagccttgccccaaggtaattcccaaagaatcaaaaggcacagaagttttagtttgggaagaatgtgtggccgatagtgcggagatattacaaaacaatgaattcggaactattatagattggacatgtcgaggtcaattctaccacaattgcacaggacaaactcagtcatgtcccagtgcacaagtgagtccagctgttaacagtgacttaacagaaagtttagacaaacataagcacaaaaaattacagtctttctaccctttggaatggggagaaaaaggaatctctactccaagactaaaaataataagtcttgtttctggtcctgaacatccacaattatggatgcttactgtggcctcatattgcattagaatttgatctggaaatcaagctatataaagaagagatcgcaagccattttatactatcgacctaaattccagtctaacagttcctttgcaaagttgtataaagcccccttatatgctagttgtaggaaatatagttattaaaccagactcccaaactataacctgtgaaaactgcagattgtttacttgcattgattcgacttttaattggcagcaccatattctgctagtgagagcaagagaaggcgtgtgggtccctgtgtccatggactgaccgtgggaggcctcgccatccgtccatattttgactgaagtattcaaagccattttaaatagatccaaaatattctttaattgcagtgattatgggactaattgcagtcacagctacggcctctgtggcaggagtttcattgtactcttctgctcagacagtaaacttttttaattattggcaaaagaattctacaagattgtggaattcataatctggtattgatcaaaaattggcaaatcaaattaatgaccttagacacaatgttgtttggatgggagataggctcacgagcttgaaacatcatttctggttacactgtgactggaatatgtcacatttttgtattacatcctaagcctataatgagtctgagcatcattgggacatggttagatgccatctacaaggaagagaagatgatcttactttagacatttcaaaattaaaagaaaaatttttgaggcatcaaaaacccatttaaatttggtgccaggaactgaggcaatcgcgaaagctgctgatggcctcgcaaatcttaacccggtcacttgggttaaaaccatcgcaagttccactattgtaaatttcatattaatccttgtgttcctgttctgtctgttgttagtctgcaggtgtacccagcagctccgaagagacagcgaccattgagaatgggtgatgacgacgatggtggttttgtcaaaaagaaaagggggaaatgtggggaaaagaaagagagatcagactgttactgtgtctatgtagaaaaggaagacataagaaactccattttgatctgtattaagaaaaattgttctgctttgcgatgctgttaatctgtaactttagccccaaccctgtgctcacagaaacatgtgctgtattgaatcaaggtttaatggatttagggctgtgcagggtgtgccttgttaacaatatgtttgcaggcagtatgcccggtaaaagttatcgccattctccattctctgttaaccagggacacaatgcactgcggaaagccgcagggacctctgccctagaaagcctgggtattgtccaagtttccccccactgagacagcctgagatatggcctcatgggaaaagaaagaccttatatcccccaacccgacacccgtgaagggtctgtgctgaggaggagtagtgaaagagggaggcctctttgcagtcaagataagaggaaggcttctgtctcctgctcatttctgggaatggaatgcctcggtgtaaagccgaccattcattctattctgaggtaggagaaaaccgccctgtggttggaggtgagacatgctggcagcaatactgctctgtgactctttgctacactgagatgtttgtgtgaagagaaacataaatctagcctacgtgcacatccaggcacagtacctttccttgaacttattcatgacacagattcctttgctcacgtttccctgctgaccttctcgccaccatcaccctgttgccctgccacactcccctcacaaagatagtaaaaatagtgatcaataaatactgagggaactcagagaccagcgccggtgcgggtactcgcacactgagctccggttgtctgggcccactgctgtttctctatactttgtctctgtgtcttatttcttttctcagtttctcatctccacctgatgagaaacacccgcaggtgtggaggggcaggcccccttcaggctgaggcaggggaatcacttgaacccaggaagcagaggcttgcagtgagtcgagatcccaccactgcactgcagcctggatgacagagaaatactctgtctcaaaacaaaagaaaagaaataagtaaatacataaaagaaagtaacagatctcttccacaaatgtggaatggacaactaactggatatccacatggaaaagaacaatgttggatccctatctcatacaatcaacctcttattttaaaacgtaaaaaaaaaacaacgaaaaataaagagagaaagagagaaacgaggaagggagccctgcgggagggggtgttactttgtcgcccaggctggcctggacccccaggttcagcgatcctcccgccctgcttcctgagtagatgggacctcaggctcccgcgcccgcgtccgcatccttgctgtgtttatccggcaggtggtgacctcactcctcgctggcctgagcactccgtccagcatcccaggcggtggctttagggaagtctctgcagctgagcacagggtggactctccctccggagtgaatggagaatagaaagggagaggatttctattctattctctgggccgtcagcatgacattgtaagttctgcccaagcagggctttgcatttcacattctactttgcatccgcgtttcagacaattccagggcttttgaatcatggatcggccttcctggccatctcgcctccaaaacccaaaaacagaggcggtgggagggaggctgagagacgcacagatcccgccccagcccagccccgccccgccctctgccggtactaaagggcaaggtctctccgcctctacccctacctggcccaggccccgcccacctcctcgcaggccccgcccaggcctggcttctgtccttccccgctcagacgcgcgcaaacccggaagcagatcgcgtggagtgaaggtccctcagcggcgcgtgagtttcgctccatcttgtatgaagtctgctcttcccaggtccccggcgcttctgtccctgggacgtggggtccctacagacctggaaattctcacccgtcttccttcgcccagagcaaattgagacgtccccgtgagagcccgggggtcacttccttttgggtttaaagtctccctgaggctggtcccgttccggatctttctgctatagggcaatatatacactttctatcgcgtagttttcctgctctaaacctttttctgactcctcccgccccgcgctttttaaagtcctcacccgagaggtgaattcccgccctgggcgcctcccagcctcgccctcgtcggcccctagagcgcagcgtcgcagctccggtcccggggaggccgagttctctgcctgtcctgggatcctacaaaccccacccttgtcttaaggcgccgtcgccccccacgtccctcctcatgccgggccctgctgctccccaggtctcccatccgcagtcacagcttgccctgagcctgcgttaggggaggtgcccgggttctgtcctgtgacacggggtgttcttgcctgcccagttccagcccctggaaaataagctcctccgggatgcaggcgtcttactccaaaccctcctgtgattgtgtgggccaaagggatcgggagacagacagcagtagaaaacctgagacagagaaaagaagaatgagaaaggcccataacagatggcaaagtagaggatgggtgagggatttgccaagagacagcaaaagtgaaaaaaaaaaaaaaaaagataagcaggaggagaaaagcaactagagaaatgtagagaaaagctagatgtacagagagatgaaggacagcaaggtagggagagggacagcaaagagggaggctcatcagggtgagggagaggaggagggatttggagccagggcagacagagcagagtggtgctggtggcaaagagaacagagggagaaccacagcagggaggacacctggggatctggggtgccagagagtggggacagggggtataacagagaagagagaatttaacggggagagcagaggaggcgcagagatggtgttgcgggaaactgaggactagagagactgatatgggggagacaggaggatgtttatttaaggtacacagcggctcagcagatttacatctaaaaagctgagcatttcaacaaacacagagtgggttttttttgctttcagaagcagagtagaagcagttaatcatataataggtcacgtaatctatagcatagcataacttgtgtccttccatagctggtggccttgtagctgcattgaaagaaaaacaagaacagctaaatacacacgtttgtcctttttttttccttcacccttgttctggaggtgggggtgtcaggagctcattcctttggcttcaacttctcaaacagcgtctcataactgttcttgaagtgagcttgctaggcagaggaaaacttcttttctttttaacccttgccttgcctgttactattcttggagtgaatgaatacatttttttttttaaatttctgcttcagtttcttcccttagatgctttttattatcaagattttaatagaaagcatcactattactggattcttcatgaaagagcaggttttcttctttaggcacaggctgatatttatacagagctattagctgagtggtagtctgcctggttacaattgcttctatagttgattaaatgttcttaacaaggagaggtaagaggtaagggagtattaaaccaattcttagtatttctagaactactcctattaaggttttgaatcgactgaaggaggaaaaccagcctctaaagagggactcgggagtctactttgtctaagtctggactggaacatgggataattttttcatacttgcagttatttctataacagccttcctgttgtcattgatttctaggcagcaattagttagattaaactttctacatactcctccttcctaggctaggaggtagtctaaagctaatctattttggtagatggcatttctcattttcatggcttactgggccagtttcattagtgatgatttcaagtactgcttgcaaatttatgatgtggttaagcgtgtaaatcggggtgcgatacctttatgacttatctcgtgcccaggtagctggcctagagtacagaattagtctttcagggggccagtctgtatctttctaatcttctatttttatgtcttttcttatgtctatatctcttttgttttttttctttaattttgttgtagacaggataccttaaaatttctccttgttgcaatgggagttagaagaaagatggtctgattgtttcaagtacacaagcccttgtccatttggctggcaactgtcagtaggcctgtggcacacagttctaatagagaccagagggtgcttgccaggtatttggagcttcaagctgatactatgtgtggtttagagaagagaaacgggagaatgagtttggatgaggtgatctggagtcatctttgccttgccacaaagttttctttagtgttttattataatattgctgtcttaaacaagttaattcttctagtgactctgtaaaagcttttccttagtgagcaacacagtatctcctgataatagaagtttttaagagctaggggcttgaaactgtgggcattgctttgggggaagagtcagttagagttaaattatcttgtggcattaacgcttttgcttcttaaggccagtggtctcctatgttagtccttctacaaacataacatgaggaaatgcttaggctgctagcaatgttttcagctagccaagcaaacaggcttttagctaaaggaggaggctctggtaacttctggtctacctgcttgtagaataatttaaagatttggaattgttgctgggccagaagggtcggggttccttttttgataacatataggtaggttgctgggtaggtgtgtgtggagacatgaatggggtaacctgcggtccacacgggtaagtctggctttagaatggtgaaatttacgggatgacagatttttgtttcacaatctggttttaccggcattttggtaagcatgattgtcctttgttgtgtgctggggtgccacgatatgcaatactgagaatctttttctggggtctcagaaggacaaggtggcatgcatacgtatctgtagtcatttctatagtatctttttataggtaggttaccatagacagatgagtctaggtctgctgatgacaagcatcaaaatacagagaaataggccctcggtaaaagggaaggaccttggtttggtttaaaagggaacttttttttgaccttgcatgaattttaaactattcaccaggtgaaaacttggagttataagatacataaggttggttattttcttggtcacaaattgagtagattgtctatgtacaagttctttttttttttgagctggagttttgctcttgttgcccaggctggagtgcaatggcacaatcttggcccactgcaacctccacctcccaggttcaagtgatcctcctgcctcagcctctcaggcacccaccaccatgcccagctaattttttgtatttttagtagagacgggtttcaccatgttggccaggttggtctcaaactcctgaactcaggtgatccacctgccttaacctcctaaagtactgggattacaagcatgatccattgttcccggccacccatgtattcttgatggaaacaatttgcttatgtcttagttctacagctgaccttcttttcactgtttttaaggtcaatagctgtgggttcgcacttctgcattttataaatgttactgtgattttcttgtaaggaagaattaaacgtcgggaaccaaaggcaacagaaccttgcaaaagaagtttctttttttttttttttttttttttttttttgagacggagtctcgctgtcacccaggctggagtgcagtggcgcgatctgggctcactgcaagctccacctcccgggttcacgccattctcctgcctcagcctccccagtagctgggactacaggcgcccgccaccacgcccagctaattttttgtatttttagtagaggtggggtttcaccgtgttagccaggatggtctcgatctcctgacctcgtgatccgcccgcctcggcctcccaaagtgctgggattacaggcgtgagccaccgcgcccggccaagaagtttctttagcccagatatgtgaaagatacctctctaattttcaaggataggggtgataaagaccaacacttccattagctcttccaggcccccatgtaataattcaggtagctgggtgcggtggcccacgcctgtaatcctagcactttgggaggctgaggcgggcagatcaggaggtcaggagatcgagattatcctggctaacttggtgaaaccccttctctactaaaaatacaaaaaattagccagatgttgggtggatgcctgtagtcccagctactcgaaaggctgaggcaggagaatggtgtgaacgtgggaagcggagtttgcaccgagatcctgccactgctctccagcctgggagacagagcgagactccatgtcaaaaaaaaaaaaaaaaaagaacaggcacaccttctcactcatctcagaccttctcagggtaacttggtgaaaatttccctgctctgagcccagtgagcctccctgcaacttggagatgaggggctagaccagaaaagctcaacccgagtgaccctggccccttaaatggttggcaaaatagaatgcatgtctgggtgtggcttttcttctgggagaggggagtgcccagttgtaattagaattttaaatgggatgcagtaccccaaaaatgaaaaaaaaataataaaatgcagaagaatggaagaaacagagttgcagactcagacacagagactatcttcggggcctttctctgtatgaggacatcacagccaaatctaaagcaggtcacgtcagtccctggcagggaaccctccaccggcttcccgtgttccccaggacaaaagcccaactcctcactgtggctccacagccctgtgtccagggcccctgccagtgtccagcctcctcctgggagcttgccctcatctcatgactccctttgccccagtcacatttgcttttcgcttttcccaaacatcagaacctttcctgtctcaggtcgttgtccctgctcttaacctatgtccctaaatgatgacagccctgtccctttcctctgcgttcaggtctaggctcagagctgtctcccatgccctccaccccatctgaagttccctctgcccatcagtctctatcacatgactcaggttttattatctctgcatcaatcacatcagaaacgcttttttttttttttttttagacagagtctcactctgtcgcacaggctgtgagtgcagtctcatgatcttggctcactgcaacctacgtctcctgggctcaagcgattcttgtgtctcagcctcccaattagctgagattacaggtgtgtgccaccacactcagctaattattgtatttttatttttagtttagttttgagtctcattctgtcacccaggctggagtgcagtgacatgatctcggctcactgcaaccaccacctccagggttcaagcgattctcctgcctcagtctcccgagtaactgggattacagacacctaccaagcccagttactttttgtatttttaatagagacaaggtttcaccatgttgaccatgctggtctcagacttctgacctcaagtaatccacccaccttggccttccagagtgctagtattacaggcgtgagccactgtgactggctcaatttttgtatttttagtaaaggcagggtttcactatgttggccaggctggtctcgaactcctgagctcaagtgattctcccacctcaacctcctaagtagctgggagcacagacacacagacatgcaccgctatgcctggctaagtttttatatttttggtagagatggggtttcaccatgttgcctaggctggtctcaaactcctgagctcaagcgatctacccctctcagcctcccacagtgctgggatgacagctgtgagccactgcacccagcctctgtatgaagtttggtcaggtctgggtcggtgccctgaagagctcattccagcccagctccccactgctgcagcgtgtgtgtaggcttccccaggaggggagtgggagttttcctgtaggagtttattgtacctggtacctggtgtggagggcagtagaggggactgtatttcatcagggtgaggtctcctttgtatgtgtcattgtgttacagggagggtgtgtgttgattctgagcaataaacaacatatttttatcactcaggattgacatctaaagactcttggtacatgaggaagaaacccggaaaaggaaagcagaggagtcagggatggctcttcctcaggtgagacgatattctcagtggattgttctgtctccttcctttcagaaatgctgaccttggagttgggaatcttctaagtctgaagcttcctgcctgacaggtttgctcacattcacccatgccttccctcagtccctctcatctcacttagattttatctcttgtggctcagtgacatgaacttgggaagaggctgcactgggcatggtcttgggaagggctcacaaccagacatggatggagacggggtgagggtcccgtggtgtcagtgctgttgggcagcagggattgttcaggggccacatctggatgcactgtcagctctctgtggaccaggattagagcagctgccactggaagtcacgcactaatgtgcacaaagtacgtggtaaattccagaaaaggagaccaatattgggaaatcctttctgcctgattttatactatatttttaggtaattgaatgggttgctgtgtttctgactccaaaatcttagtaattagaatggaaagttcatacacagacatgaatgatacaagatgtttgattccatctttattttaagaatatgaaatcaacctaaataatagcaggagattcattaatccatttgcagcatattaagctcatggagaccgtggtgttactgtggagaggcttgtgaaacaggtgttttcagtaaaaatggttataacttttctcacatatgagagcagtacttcatttttatcctagaggatggagccatattctcattccacctgttacaattattattattatgatattctgataatattattatattttaaatataagaagtctttctctgtcacccaggctgaagtgcagtggcatgatcttggctcatggcaacctccacctcccaggttcaagcgattctcctgcttcagcctccccagtagctgagattataggcatgcaccaccatgccaagctaattttgttgtatttttattagtgacaagtatcaccatgttggccaggctagtctcaaactcttaacctcaggtgatctgcctgcctcagcctccaggagtgctgagattacaggcatgagccaccatgcccagccccatcaattattattaaatatatatgtttatatttaaacatcacatgatgaatatatttgttttgtggtaaaactccaagcaaagctgcagcttataccctttgccataaagcatcttcttttctctgtcgtgtcctccaccctccttccagcctcactggggagccgctactgtcagttcggtgtcaggtgtcaggtgtggtactcatgtatttctgtatcgttatgagactccggaaaaattctgcagtaaattacaaaattttttttttacaaaaattaaccaggcatggtggcgcatgcctgtaatcccagctactcaggaggctgaggcaagagaatgacttgaacctgggaagcggaggttgcagtgagatgagattgtgccactgcactccagcctgggcacagagcaagacttcgtctcaaaaaaaaaaaaatagtttttatatttatgtttttactttaggtttggggctgcatgtgcaggtttgttacataggtaaactagggtcatcagggtttgttgtacaaattatttcatcactctggtattaagcccaactgcaacctctgcatcccgagctcaagcgattctcctgcctcagcctcctgggtagctgaaattactggggcctgctaccacacctggctaatttttgtatttttagtagagatagggtttcaccatgttagccaggctgatcttgaacttctgacctaagatgatccacacacctcggcctcccaaacagctgggattacaggtgtgagcctccttgcccagcccccaatagttattttttctgctcctctccttcctcccactctccccactctcaagcagacctcagtgtgttttgttttcttctttgtgttccaggaaatattttaccttgatatttcatcctgctagttgtgaatttacatgttgtcatgttagtgaacatggctagcttgctctttgacatctgcgttggaaattagctgaatgacaacatgtgggtcctttgtgatttttccctgtataaagagtgccatagtggctgcctctgcacgtgcctgcattcctacagatatctgaaatttcctccaggtcaggcagttgaaagggtgattgcttcttctaggatggggcatttcctgttttcttagatctgacaagattcctccctgcccccaaccgccaaagtgtccttttccagcaagatgagattcctcttcagttatacaaaacttgctattttatatttttacaacctgtatttatatatacatacacacacacatatacatatacatacgtatagacacacacaaatgtatatattttgaacaacttttacattttgaaaatctggggaaaatgacaaccctttgtattaacatctagtttttttgtgagtctgtgtaggtctcattattttgttgacaaatatatctatataatggattttcctactttgagtaatctagttttcatgtattttcttttattttgagactgggtctcactgtgttgcccaggctggagcacagtggtgtgatcttagctcactgtaacctccaccctcaggctcaagccatcctcctccgtcaggctcccaagtagctggaaccacaggtgcctgccaccatgcccagctaatttttttttttttgagatggagtctctgttgccctggctggattggtgcaattttggatcattgcaacttctgcctactgggatcaagcagttctgcatcaccctcctgggtagctgggataacaggcatgtgccaccgtgcctggctggattttagtttctgatctttcactgtggacgttgtaatctctgaagacatcactcatactctgtctcatctagatactgaatgtcacttagtgtgtcaacaaaagtttctgcgccaggcagggcccagaattgggcctgcaattccagcactttgagagactgtatcaggcagatcacgaggtcaggagtctgagacaaacctggccagtatggtgaaactccgtttctactaaaaatacaaaaattaaattggcgtggtggcatgcacctgtaatttcaactactcaggaggctaaggcaggagaatcgcttgatcctgggaggtggaggttgcagtgagcggagactatgccattgcactccagcctgagtgacagagtgagactctgtctcaaaaaaaataaaagtataacaaaacacaactgggaagacaaaatgcagtgaaaaaccccttactcggatttgtcagaacattcactgcaattaaatccatgctttcccctctctcctcttctcattttctgtaaagataagaactcctcccataaccatttggttaaaatgtgttttcatttcagggtctattgacattcagggatgtggccatagaattctctcaggaggagtggaaatgcctggaccctgctcagaggactctatacagggacgtgatgctggagaattataggaacctggtctccctgggtgaggataacttccctccagaagtggggatgtgtcctttcgtatctttgtattttctctttttttagatagagtatctctctctctgtccccaagggtggggtgcaatggtgtgatcatggctcactgcaatcttgaattcctgggctcaagtgattgtcccacctcagcctcccctcgtagtggtacaggtgcatgccaccatgccaggatacttttttagtttctttttttagagacaggttcttgctgtgcggttgaagttggtcttgatctcctgggctcaagacatcctcctcggcctcccaagaagctgggattacaggcgccaacccccgtacctaactattggcttttgtttttaaactttttgcatatgtgtgtccttagggctaatatgagtcttctgtggacaacaagtagttggttcctgttgattgagtcagtctttgccttctgagtgcagagttaaatatttgcatttgaaatattactgatgcagaagaccttaccattgcctttttgttacatattatctgtatttcttgattttttttgttgttattttgttcttattttgttttttcaggtttgttttttgttcttcattctccatttcctgcttattgtgtttaattgcttttctgtgtagacacgctttgactcctttcttctttacttttgtttgtttgtttgtttatgatggagtctccctctgtggccaaggctgcagcgcagtggggcgatcttggctcaccgcagccggctccacatctcgggctcaaacaattcttgtgccccagtggctcatgcctgtaatcccagcactttggaaggccgggggtgggcaaatcacctgaggtcaggagttcaaaaccagcctgtctaacgtggtgaaactccgtctctactaaaaatacaaaattagccagacacggtcgtgggtgcctgtaatccctgctactcaagaggctaatgcaggagagtcacttgaaccctggaggtggaggttgtggtgacctgagattgtgccatgcactcccgcctgggcaacacagtgagactctgtctcaaagaaaaaaagattccacaacctgcaaaagcttctctttctccaccagaactttatttatgtcggaattatttctgtgtatgctgcattttcattaacatatatgtacagtgttttttcatgcttttttcttctaaataataggaaaaaaagttgaattatgaagggacacatataccagtttctgtatctgtccttttatttgcctatttatttatttattaatgagacgaagttttgttcttgtcacccatgctagagtgcaatggcacaatctcgggtcactgcaacctccaactcctgggttcaagcaattctcctgcctcagtttcccgagtagctgggattataggcatatgccaccatgcctggctaattttgtattttaatagacatgggatttctcctttttggtcaggcttttcttgaactcccgccctcaggtgatctgccaacctcggcctcctaatctgctggaattacaggtttgaaaaactgcgcccggcctatctgtctttttatttacctttactggagaattttatatatatttgtgggttggagttactcttaggcttctttcatttcttttttttttttttttgagatggagtctcggtctgtcactcaggctggagtgcagtggcacaatcttggctaactgcaacctctgcctcccaggttcaagcgattctcctgcctcagtttcccaagtagctgggactacaggcatgtgccaccacaccaggctaattttttgtatttttgttttttgtagagacggggtttcactgtgttagcaagaatggtctcgatctcctgacctcatgatcctcctccctcagcctcccaaagtgctgggattacaggtgtgaaccacctcactcagccggcctcaaagtttttaaaacatgttattgctattagatggcttcaagtattgcaaaatttatagtacaggccctaaacttcctttgtttaattagatttgtcagccttcagtgatgtgaatcatgagatgcttcttttcctgtctcagtcatttcactgtcctgtcagaaatagcttagactggccagctgaggtgggtcatgccttaatcccagcagtttgggatgctgaggtgggcagatagcttgaagtcaggagtttgagaccagtctggccaacatggtgaaacctcgaatctactaaatacaagaaattggctaggtgtagtggctcaagcctgtaatcccagcactttgggaggccgagaggggcggatcacctgagttaaggaatttgagaccagcctgaccaacatggtgaaaccctgtctctactaaaaatacaagaattagctgggcgtggtggcacatggctgttatcccaagtactcgagaggctgaggaaggagaatcttgaacccgggaggtggaggttgtagtgagccaaggttacaccactgcactccagtctgggcaccaaagtgagactacaggctgaggcgggagaatctcttgaggcaggagaatcgtgccactacactccagcctgggtgatagagcgtgactcggtctcaaaaacaaacaaaaaaagaaatagcttaaactgggaggcttaagacacagaaatttatttctcatgagtttggaaagtgggaaatccaagagcaaggtgccagccacattggttcctggtgagagccttcctcatggtttagcccagccatcttcctgccatgtcctgacatggtggaaacaggaacaggcaacgagctctttaatgtctctttttatgaaagcacaagtcctattcacgagtagtcaacacccgtgaccaaattgtctcaaaggccccatctgcaggaacatcctattggagaataagaactctgaacatggcgtttggccaatacaaacattcagaccagggagcctgcatcatcttatttatgtttttattgtttaatttgtttcatacaatgttttctctgatctcagtttataaattttcccagtacacattctatgttttatattttatgcatagtgaactagatacatagggcaatgtatatatatatatagaattgctgtattgcctggctgtttcataaatgtagttgtgacatcataattgcaccctccggcactattagtcaattctttttttttttcttagagacgaagtctcaccctgtcactcaagctggagtgcagtggtgggaccttggctcaccacaaactctacctcctgggttcaaacgattctcttgcctcagccttctgagtagctgagattacaggcacccgccaccacacccagctaatttttttgtatttttagtagagttatggtttcaccacgttggccaggctattcttgaactcctgacctcatggtcttcccacctcggcctcccaaagtgctggaattacaggcatgagccactgcacccggctgttagtgaattcttattcattataatgctgcatatttttttgacctcatacatcagaaggtagtgatcttaacatgtatttcagttcttatattgtgtgctggtggtaagtagaagttgtgcttttttcttaacagggaattgtttagaattctgcagtttgtataaatgtacttatgatttgcttgctggttttatgcgttacagttattttaccaattcatttttatgattttacataaagcttttcggtatgtggtatgcaatataactgacacagtttactagttaatgtcacaaagtgccagcgggtgctgtggctcacgcctgcaatcccaggactttgggaggctgaggcgggtggatcacttgaggtcaaaagttcaaggccagcctggccaatatgatgtaaccctatctctactaaaaatacaaaaattagccaagcatgctggcatgtgcctgtaatcccatgtactcaggaggctgaggcaggagaatggcttgaacccaaaaggtggaggttgcagtgagctgagatcaggccattgccctccagcctgttgtgacacagtgaaacattgtctcaaaaatacaaaaataaaaaaaaaattttaaatgttacaatatgccttttctgcatggatataggtaattttatgacagttattcagaaaaatatttttttttttttgagatggagtctcactttgtcatccaggctgaagtacagtggtgcgatctcggctcactgcaacctctgcctcttgggttcaagcaattcttgtacctcacccttgcgagtagctgggagtacagacgtgcaccaccatgccttgctaaattttgtaaacttttcttatcttctcagtgctatgattatttaacaatacagaatttccattgattttggttatccttacatgagcttgctgtggattatttaccagtatattatattgtgtggtcctttagtatttatttgtatacagtaagtatgctgtaaatatgaagaatatatacttttcattgatgtgacagtgatatgtcttttgcaaactgttagacactttagggtcacagtggaaaaatactccttattttaggcttacacatgtttgtgcccttcagtgttttgtcatgatattggaaataagctttcataataataatttgaagcacatgtaatcgccctttatttattaaagaatcttacgattttgtgttcctaaactttgaagatcatgtttgggaagtttaaaatcagtattgtcttttgtgtacctattagtgtttatattttgtaggtatctcttccaaatgcacaatgaaggagttctcatcaacagcacaaggcaatacagaagtgatccacacagggacattgcaaagacatgaacgtcatcacattggagatttttccttccaggaaattgagaaagatattcataactttgagtttcagtggcaagaagatgaaagaaatggccatgaagcacccatgacaaaaatcaaaaaattgatgggtagtacagagcaatatgatcacaggcatgctggaaacaagcctattaaatatcagcttggatcaagctttcattcacatctgtctgaactccacatatttcagcccaaagggaaaattaataatcaagtggagaagtctatcaacgatgcttcctcggtttcaacagcccaaagaatttcttgtaggcccaaaacccatatatctaataactatggggataattttctgaattattcattactcacacaaagacaggaagtacgcatgagagaaaaatctttccaatgtattgagagtggcaaagcctttaattatagctcactcttaaggaaacatcagattattcatctaggagagaaacaatataaatgtgatgtatgtgacaaggtctttattcggaagcgataccttgcacgccatcgtagatgtcacactggtgagaaaccttacaagtgtaatgagtgtggcaagtccttcagtcagatgtcatcccttacatatcatcatcgacttcatactggagagaaaccttacaaatgtgaagaatgtgacaaagctttcagacacaattcagcccttcaaagacataggagaattcatactggagagaaaccacataagtgtaatgagtgtggcaagacctttagtcagaagtcataccttgcatgccatcgtagcattcatactggaaagaaaccttacgaatgtgaagaatgtgacaaagctttcagtttcaaatcaaaccttgaaagtcataggataactcatactggagagaaaccatacaagtgtaatgattgtggcaagaccttcagtcatatgtcaacccttacatgccatcgtagacttcatactggagagaaaccttacaagtgtgaagaatgtgatgaagctttccgtttcaaatcaagtcttgaaagacataggagaattcataatggagagaaactgtacaaatgtaatgagtgtggcaagaccttcagtcaggagttatcccttacctgccattgtagacttcatagtggagagaaaccttgcaagtgtggagaatgtgacaaggcttacagtttcaaataaaatcttgaaatacgtcagaaaattcatactggagagaaatgttataagtgtaatgattgtggcaagatcttcagtcatacgtcatccattgtataccatcataaatttcatagtggagagaaaccttacaaatgtgaagaatgtgatgaagctttcagtttcaaatcaaaccttgaaagacataggagaattcacactggtgagaaaccttacaggtgtaataggtgtggcaagaccttcagtcatacatcatcccttacatgccatcatagacttcatactggagagaaaccttacaaatgtgaagaatgtgatgaaactttcagatacaaatcaaatcttgaaagacataggagaattcataatggagagaaaccgtacaagtgtaatgagtgtggcaagaccttcagtcagaagtcatgccttacacgccatcatagacttcatactggaaataaatcttataagtgtaatgagtgtggcaagaccttcagtaaggagttaacacatgccatcatagacgtcatactggagagaaaccttagaagtgcaatgagtgtggcaaaacctttcataggcagtcagcgcttatttaccatcaagcaatccatggcagagggaaactttacaaatgtaatgattgtcaccacgtcttcagtaatgctacaactattgcaaatcattggagaatccataataaagagagaccttacaagtgtgataaatgtgacaaatttttcagacatcgttcataccttgcagttcacgggcgaactcatgctggagagaaaccttacaaatgtgaagaatgtgataaagctttcagattcaaatcaaaccttgaaagtcataggagaattcatactagagagaaaccttacaagtgtaatgagtgtggtaagatgttcagtcaaaattcggcccttgtaattcataaggcaattcatactggagagaaaccttacaagtgtaatgaatgtggcaaggtttttaatcgcaaagcaaagcttgcatgtcatcatagacttcatactggagagaacgcttgcaagtgtaataaatgtggcgaggtttttaatcaacaagcacaccttgcacgtcatcatagaactcatactggagagaaacattacaagtgtaatgagtgtggcaagacctactctcacaattcagtccttgtaattcataagacaattcacactggggagaaaccttacaagtgtaatgagtgtggcaaaaccttccatcacaattcagtccttgtaattcataaaacaattcatactggagagaaacaagcgtaatgaatgtggcgaggttttcaatcaacaagcacacgttgcacgtcatcatagaattcatactggagagaaaccttagaaatgtgaagaatgtgacaaagtttacagtcgcaaatcaaacctcgaaagacaggagaattcatactggagagaaaccataaaaatgtaagagtttttgacaaggctttcggacgtgattcacacctggcacaacatcccagagttcacactggagagaaaccttacaagtgtaatgagtgtgtcaaagcctttagtgggcagtcaacacttattcaccatcaggcaatccgtagtgtagggaaacttgactaacgtaatgattctcacaacgtcttcagtaatgctacaaccattgtaaatcactggagaagccataatgaagagagatcttacaaatgtaataattgtggcaaatttttcagacatcgttcatacattgccgttcattggcgaactcatgctggagagaaatcttacaatgtcatgattgtggcaaggtcttcagtcaagcttcatcttttgcaaaacaggagaattcatacaggagagaaacctcacaagtgtgatgatcgtggcaaagcctttacttcacattctcacctcattagacatcagagaatccatactggacagaaatcttacaaatgtcatcagtgtggcaaggtcttcagtccgacttcactccttgcagaatatcagaaaattcatttttcaggtaattgttcccaatgcaatgaatatagcaaaccatcaagcattgattgacattagagtcagttcagcattgacttgagtttgagttgacttaacattgagttcaagccttaattgacattaaagtgtttatgttaagaggactgggctgtgtggcatggctcacgcctgtaatcccagcactttggtaggccaaggtgggtaaatcacttgaggtcaggagtttgagatcagcctggacaacagacctgagccacttttcccagcctgttttttgtttctttaacaaaaactgatagggatttttatgggtatcgtattgaatctagattacattgggttatataatcatttaacatattaatttttccaaaccatcaatatgggttgtgtctctatatatgtttttaatcattttgatcaatttttgttgatttcaaggtacaaacgtctcacctttttacgtttattcctaagtatttcttattttaagttctccagcaaatggaagtgtgttaaaattttcttttaaaattgtttattattaaaatatggaaattcaactaatttttggtgctgatactgtattgtgcaaatccactgaatatgtttgttagttccagtactattttggttgagtctgtgattttctacacagaaggtcatgtcgtctacaaacaaatgtaattttacttctttctttctgatttggatgagtttgatttcttttgctatttaattgctctggctaggacaggcagtattgattgaatagaaggggtgagagcattcttgcatcatgtgagatcgtacaggaaagcattccattttccctgcttggttatttactcatttgtcatttcatggatgttctttctattgttgaggtaaatttccttttctattttgtttaggatttctatgatgactggattttgaattttgtggaacgctttttctccatctactaaggtgatgtggttttaatctttcattctgttctagtggtatataacattgatttgcttgaatatgttgaaccatccttgcatcccagaaataactggcacttgaatatctacatttttttaatatcctcttgaatacagttttctaggacaagggatcttcaagaagttctggaaaaatacatattatgagaaaattgtgcatgaatttcacaatttttgcaccaaaataaactagtgctagtctgttataacatgtctgaacaggctctagtttgatgccctcaaaaggataagacatgagtataaaaagagactccatcaaagcaatataaattctgatgaaatttaaacaagaagaaacattaaatttatgatgagaccagatgcagtggctcaggcctgtaatcccagcattttcagaggctgagacaggtgggccacatgagcccaggtattcaagaccagcctgggaaacgtggggaaatccccttttctacaaaaaatacaaaaattagctgggcatggtggcacatgcctgccgtctcagttattgtgaagtctgtgcagggaggatggcatgaacctgggaggtcaagattgcagtgagctatgatcatgccactgcactccagcatgggtgatggagagagatactgtcttaaaaaaagaatacttgtggtaacgtttgggtagaggaataatgaaatcattgatgctttataaaaaggttatggggacaatgcccaaaagaaataaacagtttgtaaacggataacttattttgagttagggcaagacaatgttgacagtgatgcatgaagcagcaggcagaccttccacatcatttttacagaaaaaaaaattaatcttgttcatgctgcaatgaagaggactgacagcaaacagcagaaacatagtcagaatttagagaacagcctggttaacatggtgaaacaccatctctagtaaaaatacaaaaattagctcagcatggtggcatgcgcctgtaatcccagctactcaggaggctgaggcaggggaatctcttgaacccaggaggtggaggatgcagtgaactgagatggcaacattacactctagcctgagcaacaagagcaaaactccatctcaaaaaaaaaaaaattgtcaagttccttctcttccattctttgccatcgtggtgtgtgcttgactctgcttcttgccacatcttctcagaagactttcaggattaagcgattcctggccaagaaacaaaagcaaaaccatcccactcccctgtggattcagatcaaaactggtaataaaatcaggtacgactccaaaaggagacattggagaagaaccaagctgggtctataaggaattgcatgtgagatggcacacatatttatgctgtctgagcatcacaatcacgttaccatatcaagctgaaaatgtcaccactatctggacagttggacatgttttattgggaatatgttttttctctgtaaatttgttataaacgcattggttggctgtgttcagtaataaacgtgagacttttcatttcaaaacaaaagtcaaatgatgtaattccatagagtaccttaatttctgttttttgttttgttttgttttgttttgagatcgagactccactgggttcagtggatcacacctgtggtcctgccactttgggaggcttaggtgggaggattggttgagaccaggagtctcctgggaatcttctcgtctcccctaacccagttaatgacagacctttgtcctttctgttatggaaaagtctatagaaaacaatatcagtgtgtcaaagcattatgtctgtcacaagctcatgaaaggaaaataaaaatgactaagccagagagaaaagtcaagctgggaactgtatcagataaacctacctcccattttgtttctaaacgagatagctacaaagactaaaagaaagctacatacagactgggcgcagtggctcatgcctctaatcctagcactttgggaggccgaggtgggcaaaccacagtacgtcaggagttccagaccagcctgactaatatggagaaaccctgtctctactaaaactgcaaaattagccgggcatggtggcgcatgcctgtaatcccagctactcaggaggctgaggcaggagaatcgcttgaacccaggaggcagaggttgtggtgagccgagattgcgctattgcactccagcctgggcaacaagagtgaaattccatgtcaaaacaaaacaaagctatagactcccctcacaaactggggacctcgagatctccaccctaaaatagttcttttgaatttcccactgccaatgtaaactaatagcttatcttcacaggtgtgggacagaacccatccctctgcacacctgagatgaatgcctatctgattgcttcccctgtcctatttatgtaaaaatgtagagtcactgaggcagtctaaggcataagtgactattcctccaccccctctcacatgtaaattgtgtattcagggccaggcatggtggtggctcacgcctgtaatcccagcactttgggaggccgaggtgggtggatcctgaggtcaggagatcgagaccatcctggcaaacatgaacacggtaaaaccctgtctctactgaaaatacaaaaaattagccaggtgtggtggtggaagcctgtagtccagctactcgggaggctgaggcaggagaatggcgtgaacccaggaggcagagcttgcagtgagtggagatcgggccactgcactccagcctgggtgacagagcgagactctgtcacggaaaaaaaaaaaaaaattgtgtattcagtgaaaggctgatgaaagactcaatgtgatcatttgttatctacgtgtgacccagaagccccccaattgcagttattccacctttccagaccaaaccaatgtataacttacatgttttgattgatgtattatgtctccctaaaatgtgtaaaaccaaactgcagcctgaacaccttgggcacacgttgtcaggacctcctgaggctgtgtcacgggggcatttttaaccttggcaaaatagatttctaaattgattgagacctagtagatacttttggttcacaagctcatgaacacagaagaaatcaaaatagaataagaaaaaaatgaggtgtagtggaaagcacaatatcagttccaaaatttgaactccttcatatttattcaacatagggagatgctcttcaactttgggtggttagattccatttgtgaaagatacatatttctaatgtagcaggatgagtcacagacaaaactcctcagacaccagattaaagaaggaagaggttttttattcagctgggagtgtcagcagactcgcgtcttaagagccaagctccccaaaaaagaaattcctagcccttttaagggcttacagctctaaggggtctacgtgaaaaggtcataatcaagtaagtgtgaggaatgtgactggaggctacatacatcagctaacagaacagaaagttttacagtactttctcatacaatgtctgaaatttacagataacaccagtagttttggtcaggggttaatattattattattattattattttcaccaccagggtcaggtggtggcgccaaggtcgtctagctatttatcttagttctgcttctttccaactttttgctttctcccttttctcctgtcttataaaccaggcaaaaggggaggttggggagaagctgggaaggacaacaggagaagtggtggcctcattccatactaatatttgattaaataacccattctatgtaattttagccaatttaaatggcaaataataaatgatcaattatatacatacataaaacttcctaatatttcacttagtattgctattactatgttcttgggacagaagttcagcctgtcagatacaagagagtggtgtctccataactgtgcttagaactccgtgctgcatgaatggataaactgttaagcaggaacctaggaaagctagaatgacaaagttcaagtttattaaaactagcaaaacatattccttactgctcatgcatgagtcacggtcataagatgtttacagttaaggaaagcagcttcatgatacctgcaaggacgaactcctacagaaacacaatgtccaagataacctaatatccgatgacaatgtatgcttttaagaagcaggctggtcgcaaactcctgacctcaggtgatctgcccacctcagccttccaaagttctgtcattacaggcttgggccactgtgcccggccaaagatagctttaaatcaacaaagtaataagttttgtcacactgtcagctcaccggcaggtagacataacttagcttttacttaggcccctatgtaagaaaaacttcatgaggaggcactcccccagccttctgaggacaccctactgtgtaactggtagctttcaataaactctcctcactgcattcggacacttgccttgaattctttactacgcaagatccaagaatgttaacatggggtgtagactgtgacctcgttttaggcaacaaaatgactgaacgttatacaaaaacaacaattgatccaattctcataaaagtaggaattttgtagtcctcatccagcatgccaagcaaagatcgacactgtggagtcaccgctcatgagaacaaaggggctgacagctgggaaacatgggtagatgagggtgaggcgctcagcagctgccaactgggattattgaaaagggcaataggatcttggaagggggagaacacagtataaagcgacacaaatgctgcagaggcactggccctgcaagcttcacatgggggagttggaaatccctgacaactgcacaatcttgcgtgtggatttcaacatcccgaagcaaccagattcctgctgtggctagactcggggataaggtgctgcgaaagacaggtttgaagcagaaagaccaagaaaacactcatctgagccagccccgggcgctgcagaacaaccatgggcaggccctccaccccgtctgggcggattctggacagtcggcggtgacccggagggagaaggaaaggtcgtcgagggggcggagcctgaaccggtgcttgggcggggccagaaggtggaggccgctttggaagccgggccaggttagagggtgggggtgggacctggaacgggactggggcggggcaagagggaggaggctgccttggggccgcccaggacagcgagaagggctggggccagagggttatcattttcggggcggggtctgaaaggggttttgttctgaagggcggggcctgaaggggggcggatccgggttctttcctcagctgggccatggctgtcgcctgctgtcatactcttgccctccaggactgggtcctccgggttctgattggtggattgtttctgatgtaccgtgatattacccctaatattacatgtagtgagccacctgtaccgaacgcttaatcgtttttcctcttaagttgaaaatagttttaatgcaaagagcctttttggagcaggtagagtcatgcatccttcaggcggggcacgctcccctcagtctgaagcagggcggggtagaggggcagggacctcggtaaaggactggagtagggcgctggttgcagctgggactgacaacgagaaggcttattaaactaagcaggatcctgggttgagtggataatgggaactgaaaggtgacatgcaaaactgcctattacacacaggaggtgaaggacaattcgtatttcatggaaataaagtcagggcccagagtagtggctcacatctgtaatcccagtgtgtctggaattggttccctctggtgggttcttggtctcgctgactttaagagtaaagccacagagcctcgcggtgagtgttacagttcttaaagatggcatgtccagagtttgttccttcagatgttcagatgtgtccggggttttttccttctggtgggttgtggtctcgcttgacttcaggattgaagcggcagacctttgcagcgagtgttacagctcttgaaactgtcgcgtctggggttgttttttcctcctggtgtgttcgtggtcttgctgacttcaggagtgaagctgcagaccttcgcagtaatttggccctgcccatgtcctgctaatgggtccattttacagagtgctgattggtccatttttacagagtgctgattggtgattttcaaacctttagctagacacagagcactgataggtgcatttttacagagtgctgattggtgcgtttacaaacttttagctagacacagaggcctgattggtgtgtttacaatcctttagctagtcagagaagttctccaagtccccacccgacccagaagcccagccggcttaacctctcaccagcactttgagaggcagaggtgggaggatctcttgagccaaggagttcaagatcagcctgggcaacatgatgagacctcgtctctactaaaaaaaaaaacaaaacagcccggtgtggtggtgcacgcctgtggccccagctgctcggggcacttaggtgggaggatcacttgagccagggagttggaagctgcagtgccctgatctcgccaccacactctagcttcagtgacagagctagaccctgtctcaaacaaacacgtaaataaatgagaggtgtaattcctcccttgaaaataaaggaagagattttctttcctttcatctcttttcttaggacactgatttcgaaagtttgcaaatggattttctctgtcttctgagttttttttttttttttttttcagatggagttttcctctagttgtttaggatggagtgcaattgcacgatcttggctcaccgcaacctccgactcccgggtacaagcctggttttgaactcctgacctcaagtgatttgcccgccttggcctctcaatgtgctgggattacaggcatgagccaccgcgcctggtctgaagtggtattttttagaaacgaactaaaccttttttcagcttaatgacccagggatgtatttctgaaggacttgggagctctctttgaaaggcaaaatacaagggagacagtacctgtatctcagtaggaaattaagtaattcaaacatcaaataattccaatttaaagctatggcctttaaataattctgagcctttgaggagagaggccatttctcttactgtctcctgtctctgaagaggaggaagtaaaagctgaaaaacaacaggaatgaattcagtgacaagaccagccagcgccactgatgaccaggcctgaggttaaaagattaactgccccccaactctaaccacatgtgctcttaatctgtcatgaccttttcccgtggaaccccttagagctgtaagcccttaaaagggccaggaactctttcttcggggggttcaattcttgagaggcaggtctgccgacactcccggccaaacaaagtcttcaaagagctcggttcttgagacgtgagttggccgatgctcccggctgaataaagccacttctttctttaaccgggtgtctgagggcttttatccgcggctgctcctgctacaccttgagaggaatgtgctcatgcaacctgagtccagcggaacgcaggcgtaacttctacgagttttcctggctggctgcggtggcttatgcctgtaatcccagcacattgggaggtcaaggcgggcagatcacttgaggtcagaagttcggaaccagcctggccaacatggtaaaacccactctctactaaaaatgcaaaacaaaaggcgaggcgcggtggctcacgcctgtaatcccagcattttggaaggctgaggcgggcggatcacaaggtcaggagtttgagaccagcctgcccaacatggcgaaaccctgtcactactaaaaatacaaaatttagcggctgggccaggagaatcgcttgaacccgggaggtggaggttgcagtgagcaggtgagatcgtgtcactgcactccagcctaggcaacagagcgagactctgtctcaaacaaacaaacaaaaaattagacaggcatggtggcgtgtgcctgtaatcccagctacttgggaggctgaggcaggagaactgcttgaatccaagaggtggaggttgcagtgagccgagatcgccccactgcactccagcctgggcgagtcttgcccttatttacaggaaaagagttctcctgtaaataactaggaagactaagcagccccagagataaggcctcctgggatcattgtccctttttatggagtgataacataaccttccttgaagtgtatgactccgtcaccaatcaacttgctgcaacctatgcactggtcttgaatggaaaatgtgttgattctcctaaaacttctctgtctttccctgtgtgtgaaaccttaacgtctctacttgggaacgttgatcccattcattaggagttgatgtttgccggtggctatcctcatgctttgtgttcagataaactctatacttaatcataaattctaaatgttattatttactgctgacatcagtttctgtcacattgtaggagcctcaccagagagggcacctgtagccatgttgtaaaactcacacttgtcaaaaagacatgggttagtgtttctccccctccctctgcatgaagctaattagctgacacagatggtcacctccattaccaactagagccaggatgaactatgtgtgaccaagggtgttgtcaagtccttttccctgaggactgattagtgtttatcttgaaaacatgtacttaatgggttgtatagaactgtgaagtgtctttctcttttttcaacctcttagctctttgcctctatttcccatcacattctggtctaaggcttacttattaataaaatggtgtttatttctttctctattatcgtcatggagatgttttgtcatttgggggaagatttttttgtttcgttttcaattgtattttcttaacaattagaaagtgaagtaaaaagtatttggccaggcgcggtggctcccgcctgtgatcccagcactttgaggaggcccaggcaggtggatcccttaaagtcaagagtttgagaccacactggccaacatggtgaaactcgtctacaaaaatacaaaaattagccgggcatggtggcacgcgcctgtaattgcagatactctggaggctgaggcaggggaatcgctgaaacccaggaggcagaggctgcagtgagccgagatcccatcacggcactctagcctgggcgacagagaaatactctgtctcaaaacaaaagaaataagtaaataaataaaggaataaatctcttccaaaaatgtgctgaggcaactaactggatatccacatggaaaagaatactgttagatccctatctcacacaatcaaactcttattttaaaacgtttaaaaaaaaaggaaaaaaaagagagagtgacgaggaagggagccctgcgggagggggtgttacattgtcgcccaggctggcctggacccccaggctcagcaatcctcccgccgctgcttcctgagtagctgggacctcagtctcccgcgcccgcgcccacatccctgctgtgtttatccagaaggtggtgacctcactcctcgctggcctgagcattccgtcccacatcccaggcggtggccctagggaagtctctgcagctgagcacagggtggactctccctcccaagtgaatggagactggaaagggagaggatttctattctgttttgtgggctgtcagcatgaaatcgtacgttccatccaggcagggctttgcattttacattccagtttgcatccccgttccagacaattccagggcttttgaatcatgcctcagccttcctggccggtctcgcctccaaaacccgaaaactgaggccctgggagccaggctgagagactcacaggtcccgccacagccccgccctctgtcggttctaaagggtaaagtctctctgccccgcccctacctcgcccaagcccgcccacctcctcgcgggtcccgcccaggcctggcttctttcctgcgcgcgcagcttcgcgcagacccggaagcggacggcgtggagtgactatcccaccgccgcgggtgagtttcgctctgttttgtattaagtctgtgcttcccaggtccctggcgcttctgtacctggggcgtggggtctccactaacctggaaattctcagccgtcttccttcacccagagcaagttgagacgaccccgtgagagtccgggggtcgcttccttttgggtttaaggtccccctgaggctggtcccgtcccgggtgtttctgctatagggcaatgtatacactttctatcacgtagttttcctgctctgaaactttttctgactcctcccgtcccgcgctttttaaagtcctcacccgagaggtgaattccctccctgagcgcctcccagtctcgccctcgttggcagctggacgcagcgcggcggccccagccccaaggaggccgcgtcctctgtctggtcctgggatcctgcagaccccacccttgtcttaaggcgccgtggcgccgccgcctccctccttttgcgggccctactgctccccaggttcgcctccacagtcactgctttccctgagcccgagttagggaggtgcccggggcctgtcctgtgacacggggtgttcttgcctgcccagctccagcccctggaaaatgcgctcccccgggatgcaggcgttttgctccaaaccctcctgtgtcttatccaaagcctccggtgcttgtgtaggctaaagggatcaggagacagacgtagagcagtagaaaacctgagacagaaaagaagaataaaaaagactcataacagatggcaaagtagaggatgggtgagggatttgccagacacagcaaatgtgggggaaaaaaaaaaaaaggaggagaaaagcaactggagaaatgtagagaaaaggtagatgtacagagagatgaaggacagagagcaaggtagggagagggacagcaaagagggaggctcatcagagtgagggagaggaggagggatttggagccagggcagacagagcagagtggtgctggtggcaaggagaacagagggagaagcacagcagggaggacacctggggatctggggtgctagagagtggggatgagggtataacagggaagagagaatgtaacagggagagcagaggaggcgcagagatggtgttgcgggaaactaagtactagagagaccggtatgcgggagacagaacgatgtttatttaaggtacgcaccggctcagtggatttacatctaaaaagctgagcatttcaacaaagacagagtggggtttttataagcaggcttacagaagcaaaataaaagcagttaatcatgtaatgattggtcacataatctatagcatagcataacttgtggccttgcatagctggtggtcttgtagctgcattgaaagaaaaacaagaacagctaaatacagactttttttttcttcactcttgttctaaagtggggttttctggagctcattcctttggcttcagctgcacaaaaagcgttatcttataactgtccttgaagtgagcttgctaggcagaggaaaacttgttcttcttttctttttaacccttgccttgcctgttagttttttggagtgaatgaatgcatattgattttttaaatttctgcctcagttttctccctttgctgctttttataaataaggttttaatagaaagcaccactattactggattcttcatgaaagagcaggttttcttctttaggcacaggctgatatttatatggagctattagctgagtggtagtctgcctagtcacaattgcttctatagttgattgaacgttcttaacaaggagaggtgaggtaagggagtattaaaccaattcttagtatttctagaaccactcctgttaaggttttgaatcgactgaaggaggaaaaccagcctctaaagagggactcgggagtctactttgtctaagtctggactggaacatgggataatttttttattcttgcagttacttctataacagccttcctattgtcattgatttctaggcagcaattagttagattaaactttctacatactcctccttcctaggctaggaggtagtcgaaagctaatctattttggtagatggcatttctcatttttgtggcttgctgggccagtaagtctaatgcatttgctgtttcattagtgatgattccaagtactgcttgcaactttatgatgcggttaagcgtgtaaacttaagtgtgcccggctcaatttttgaatttttagtagagacagggtttcaccatgttggccaggctggtctcgaactcctgagctcaagcgatcctcacacctcagcctcctaagtaactgggaccacagacacacagacgtgcacaaccatgcctggctaagtttttgtacttttggtagagatggggtttcaccacgttgcccaggctggtctcaaacctgagctcaagagatctacgcacctcggcctcccagagtgctgggatgacaggcatgagccaccgcacccagcctttgcatgaggtttggtcaggcctgggtctgtgccctaaaggggagctcatcccaccccagctccccactgctgcagcgtgtgtgtgggcttctccgggaggggagtgggagttttcctgtaggagtttattgtccctggtgtggtcggcagcataggggaccgtatgtcctcaggatgaggtctcctttgtatgtgttgttgtgttacagggaggggatatgttgattctgagcaataaacaacatatttctaacattcaggattgacttctaaagactcttggtatgtgaggaagaaacctggaagaggaagaggaaagcaaaggagtcagggatggctcttcctcaggtgagatgatattcttggtggattgttctgtctccttcttttcagaaatgctgaccttggagtttggaatcttctctgagtctgaagcatcttgcctgacaggtttgctcgcactcacccatgccttccttcattccctcttatcttgcttagattccatctcccatgatccagtgacatgaacttgggaagaggctgcactgggcatggtcctgggaagggctcacacccagacatggatggagatggggtgagggtcccatggtgtcagtgctgttgggcagcagggattgttcaggggctacatctggatgctctgtcagctctctgtagaccaggattagagcaactgccaatggaagtcatgtattcatgtgcacaaagtatgtggtaaattctagaaaaggtgaccaatatggagcaattttttctgcctgattttatactacatttttaggtaattgagtgagttactgtgtttctgactccaactatcttactaattagaatggaaagttcatacacagacatgaatgatacaagatgttttattccgtctttattttaagaataggaaatcaacctgaataatagcaggagattcattcaaccattcttagcacattacgctcatggagactgtggggttcctgtggagaggcttgtgaaacaggtgttttggttataatttttattatcagtactattatattatgataatattattatatttcacatatatgaagtcttgctttgtcgcccaggctgaagtgcagtggcatgatcttggctcacagcaacctccaccttccgggttcaagtgattctcctgcctcagcctcccgagtagctgggattataggtgtgcaccaccacgcccagctaattttgttgtatttttattagtgacgagtatcaccatgttggccaggctggtctcaaactactgacttcaggtgatctgcctgcctcagcctcctggagtgctgggattacaggtataagccaccatgcccagccccaatgattattattaaatatatatttttcttttttttaaaattattattatactttaagttttagggtacatgtgcacaatgtgcaggttagttacatatgtatacatgtgccatattggtgtgctgcacccattaactcatcatttagcattaggtatatctcctaatgctatccctcccccctcccccaccccacaacagtccccaaaatatatatttttctatttaaacatcacatagtgaatatatttgttttgtggtaaaactccaagcaaagctgcagcttagaccctttgccatcaggcatctcccttccctgttacatcctccacccttcttccaaactcactggggagtcaccactgtcagttctgtgccaggcgtcagagcaagtctcatacacatgtatttctgcatcatatgagactttagaaaaaattattcaataaattgaaaaaaaaataacttttttacaaaaattagcctggcgtgatggcacgtgcccctaatcccagctattcaggaagctgaggcaggagaatcacttgaacctgggaagcagacattgcagtgagctgagattgtgccactgcaccccagcctgggcacagatcaagactccatctcaaaaaaaaaaaaaaatttttacgtttggggccatatgttccggtttcttacataggtaaactagggtcatcggggtttgttgttcaggttatttcatcactctggtgttaagtcccgtacccaatagttattttttatttatttatttttttgagactgagttttgctctttttgtccaggctggagcataatggcatgatctcaactcactgcaacctctgcctcccgggttcaagtgattctcctgcctcagcctcctgagtagctgaaattacaggggcctgctaccatgccttgataatttttgtatttttagtagagacagggtttcaccatgtgggccaggctgatcttgaactcctgacatttgatccacctgcctcagccactcaaagtggtgggattacaggcatgagccaccgcatctggcccccagtagttattttttctagtcttctccttcctcccaccctccaccctcaagtagacgccagtgtctgttgttttctttgtgctccagtaaatattttacttcgatatttgatcctgctggttgtgaaaatttacatgttctcatgttagtaaacgtggatagcttgctctttgacatctgcattggaaattggctgaatgacaaatgggcctttgcaacttttccctgtataaagagtgccatagtggctgcctctgtgcacacccgcgttactacagatatctcacgattcctccaggtcaggcagttgaaagggtgattacttcctctaggatgaggcatttcctgttttcttagatctgacaagattcccccctgtccccaactgccaatgtatccttttgcagcaagatgagattcctcttcagttcaacaaaacttgctactttttatatttttaaagcctttatatgtatacacacccacacacacaatatacacatacacatatacatatacatacatatacacatgcacaaatatatatattttgaacaacttttccattttgaaaatctggggaaaatgacaaccctttgtattaacatctagttttttgtgagtctgtgtaggtttcattatttgttgacatatatatatatatatatatacacacatacataaaatggattttcatactttgagtaatctagttttcatatattttcttttgttttgagactgggtcttactgtgttgcccaggctggagcacagtggcacgatcttagctcactgaaacctccaccctgaggctcaagccatcttcctacctcagggtcccaagtagctgggaaccacaggtgcctgccaccatgcctcgctaattcgctaattttttttttttttggagatggagtatctgttgcccagactgtagtgcagtggtgcgatttcggatcattgcaacctctgcctcctgggatcaagcaattctcctgcatcagcctcccaggtagctgggataacaggcatgtgccactgcacccagccagattttagtttctcatctttcactgtgaactgtgaatgtcatctctgaagacatcattcatactctgcctcatctagatactgaatgtcacttggtgtgtcaataaatgtttctgggccgggcactgtgtctgacgcctgtaatcccagcactttgggaggccgaggtgggcggatcacgagatcaggagatcaagacaatcctggctaacacggtgaaaccccgtctctactaaaaatacaaaaaattagctgggcgtggtggtgggcgcctgtagtcccagctactcgggaggctgaggcaggagaatggcgtgaaccggggaggcggagcttgcagtgagccgagatcgcgccactgtactccagcctgggcgacagagcgagactccgtctcaaaaaaataaaaataaaaaaaaaaacgtttctgggccgggcacggtggatcatgcatgtaattccagcactttgagaggctgagtcaggcagatcaggaggtcaggagtttgagaccaaactgggcaatatggtgaaaccccgtttctgctaaaaatacaaaaattaactggtcgtggtggcacgtgcctataatttcagctattcaggaggctaaggcaggagaatcgtttgatcctgggacttggaggttgcattgagcagagactgtgccattgcactccaggctgggcaacagagtgagactccacctttaaaaaaaaaaaaaagaactttagtaaacacaactgggaagacaaaatgcggtgaaaaatcccttactcagatttgttagaacattcactgcatttaaatccatgccttcacctctctcttcttctcattttctgtaaagataagaactcctcccataaccatttggttaaaatgtgttttcatttcagggtctattgacattcagggatgtggccatagaattctctcaggaggagtggaaatgcctggaccctgctcagaggactctatacagggacgtgatgctggagaattataggaacctggtctccctgggtgaggatgacttccctcctggggatgtgcccttgcgtatctttgtattttctctccttttttttttttttttttttttttttgagatggagtctcgctctgtcgcccaggctggagtgctgtggcatgatctcggctcacggccagctccgcctcccgggttcacgccattctcctacttcagcctcccaagtagctgggactacaggcacccaccaacatgcctggctaattttttgtactattttttactagagacggagtttcaccatgttagccaggatggccttgaaatcctgacctcgtgatccacacacctcggcctcccaaagtgctgggactacaggcataagccaccgtgcccggcctatattttctcttgtttttagataaagtgtctctctctgtcagcccgggtggagtacaatggtgtgatcatggctcactgcaatcttgaattcctgggctcaagtgattgtcccacctgagcctcccctggtagctggtacaggtgcatgccaccatgtcgggcaacttttttagtttgttttttttccagacagggtcttgctgtgttgttgaaattcatcctgatctcctgggctccagagatcctccttagtctcccgagtagctgggattacaggtgccaaaccccatacctaattattggcttttattttaaaaatttttgcatatgtgcagctgggcatggtggctcacacctgtaatcccagcacttcgggaggctgaggtgggtggatcacgaggtcaggagatcaagaccaccctggccaacagggtgaaaccccctctctactaaaaatacaaaaattagccaggtgtggtggcacgtgcctgtaatccaggctgagacaacaaaatcacatgaacctgggagtcagaggttgcagtgagccaagattgccactgcactccagactggcgacagagcgggactctgtctcaaaaaaaaaaagaaaaaaaaatttcatatgtgtgtccttaaggctgagtctgtgagtctcttgtagacaacatgtagttgattcctgttgattcagccagtctttgccttctgagtgcagattaaatacttacagttgaagtattactgatggagaagaccttacccttgtgattctgttacatattatctgtatttattgtaggtttttttgttcttcatttctcatttactacttttgtgtttatttgcttttttgtgtagacatgctttgactcccttcttattgacttttgtttgtttgtttgtttatgatggagtcttactctgtccccaaggctacagttcaatggtacgatcttggctcaccgcagccggctccgcctttcaggctcaaacaatttttgtgccccagtggctcacgcctgtaatcccagcacttcgggaggccgaggcaggcaaatcacctgaggtcaggagttcaaaaccagcctgcctaacatggcgaaactccgtctctactaaaacacacaaattagccggacactgtggtgggcgcctgtaatcctgctactcaagagtctaatgcaggagagtcgcttgaaccctggaggtggaggttgaagtgagccgagattgtgccactgccctccagcctgggtgacagcacgagactctgtctcaaaaaaaaaaaaacaacaacaacaaaattccataacctgcaaaagccactctttctctactagaactctgtatttatgtcagaattatttctctgtatgttgcattcgcattaacatatatgtagtgttttttcatgcttttttcttctaaataacagaaaaaaaagttgaattatctagagaaggtatacttacaccagtttctgtatgtgtcctgttatttgcctattcatttatttatttctttgttgatgagatgaagttttgttcttgtcgcccatgctggagtgcaatggcacaatctcgggtcactccaacctccaactcccaggttcaagtgattctcctgcctcagtgtcctgagtagctgggattacaggcatgtgccaccacacctagctaattttgtattttagtagacacaggctttctcctttttggtcaggctggtctcgaacccctgccctaaagtgatccaccaacctcggcctcctaaactactgggattataggtgtgaaccaccgtgcccggcctgtctttttatttacctttactggagaactttatatatatttgtgggttggagatactctttagaattctttcatttctttctttttttctttttaagacggagtctcggtctgtcacccaggctggagtgcggtggtgcgatcttggctaactgcagcctctgcctcccaggttcaagtgattttcctgcttcagtctcccaagtagctgggactacaggcacatgccaccacacctggctaatgtgtgtgtgtgtgtgtgtttgtgtagaaatggggtttcaccctgttagccagtatgttcttcatctcctgacctcgtgatcctcctgcctcagcctcccaaagtgctgggattacaggcgtgaaccaccatgcctggccagcctcaaagtttttaaaacacgtaattgctatagatggcttcaggtattgcaagatttatggtacaggctctaaacttcctttgtttaatcagatttgtcagccttcagtgatgttgatgatgagatgctcctgttcctgcctcagtcatttcactgtcagaaatagcttagactggccacccgaggtggctcacacctctaatcccaacagtttgggatgccaaggtgggcagatcgcttgaagtcaggagtttgagaccagtcttgccagcatggtgaaacctcaaatctactaaatacaagaatttggccgggcacggtggctcaagccagttatcccagcactttgggaggccgagaggggcagatcacctgaggtcaggagttcaagaccagcctggccaacatgttgaaaccccgtctctactaaaaatacaaaaattagctgagcgtggtggcgcaaggctgttatcccaagtacttgagaggccgaggcaggagaatcactagaacctgggaggtggaggttgcagtgagccaagattgccccactacactccagtccaggcaacaaagtaagactccgggctgaggtgggaaaatcatgccactacactccagcatgggtgatagtatgtgactcagtctcaaacacaaacaaaaagagaaatagcttaaactgggaggcttcagacacagaaatttatttctcatgaatttggaaagtgggaaatccaagagcaaggtgccagccaaattggttcctggtgagagcattcttcatggtttagcccagccatcttcctgccgtgtcctgacatggtggaaacaggaacaggcaacgagctctttaatatctctttttatgaaagcacaagtcctattcacgagtagtcaacacccatgaccaaattgtctcaaaggccccatctgcagaacatccttttggagaataagaactctgaacatggcttttggccaatatgaacattcagaccagggaggctgcatcatattgtttgtgtttttattgtatgatttgatttataaaatgttttcactgatctcagtttaaaaattttcccagtacacattctatgttttatattttgtgcatagtgaactagataattaataccaactatatatatatatatatatatatatatatatatatatatatatatataaaattgctgtattgcctggctgtttcataaatgtagttgtgacatcataattgcaccctctgacaccgttagtcaatttttttttttttttttttggagatgaaatctcactctgtcactcagctggagtgcacaggtgcaatctcggctcactacaacctccacctcctgggttcaaatgattctcctgcctcagccttccaagtagctgagattacaggcagccaccaccatgcccagctaatttttttgtatttttagtagagtggggatttcaccatgttggccaggctactcttgaactcctcacctcatgatctgcccacctcagcctcccaaagtgctgggattacagacctgagccaccgtgtccagccgttagtcaattcttattccttataatgctgtgtatttttttgacctcataagtcagaaggtagtgatcttaacatgtatttcagttcttatattgtctgctggtggcaagtagaagtcgtggcatttttcttaacagggaattgtttagaattttgcatgttgtataaatgtacttattatttgcttcctggttttatgggttacaatattttactaattaatttttatgattgtacatgaggcttttcggtatgtggtatgcaatataactgacacagtccactagttaatgtcacacagtgccaccggatgctgtggctcacgcctgcaatcccaggactttgggaggctgaggtggctggatcacttgaggtcataagttcgaggccagcctggccaacatgttgaaaccctatctctactaaaaatacaaaaattagccaaacgtggtagtgtgtgcgtgtaatcccaggtactcaggaggctgaggcaggagaatggcttgaacccaaaaggtggaggttgcagtgagctgagatcgggccattgaactccaggcggttgtgacagagtgaaacttcatctcaaaaatataaaaataaaaaatttgtttaaaaatgtcaaaatgtgccttttctgcaaggatataggtaattttatgacagttattcagaaaaacattgtattaacattttttttcaagatggaatctcactttgtcacccaggctgaagtacagtggtgcaatctcagctcactgcaacctttgcctcttgggttcaaacgattcttgtgcctcgtgagtcccatgagtacgtgggactaaaaatttgggactaaaaaagattaaaaattacattttgtaatcttttcttatcttctcagtgctatgattgtttgacaatacagaatttccattgattttggttatccttacataatcttgttgtggattattttccaacacagtacatcatgtggtcctttagcatctatttgtatacagtaaatatgctgtaaatgtgaagaatatatacttttcattgatgtgacagtgatatgttttttacaaactgttagacactttagggtcacgatggaaaaatattccttactttaggctacacgtttttgtgccctgtcagtgttttgtcacgatattggaaatagacttccgtaaaaataatttgaagcacatgtaatcgccctttatttgttaaagaatcttatgcttttctgttcctaaactttgagggtcatgtttgcaaagtttaaaataagtattgttttttgtgtcatatttacacatttcagcattatttaccatctgtacttaatttgaaaccttttggtgtgtatactttttagatatctcttccaaatgcatgatgaaggagttctcgtcaacagcacaaggcaatagagaagtgttccatgcagggacatctcaaagacatgaaagtcatcacaatggagatttttgtttccaggatattgataaagatattcatgacattgagtttcagtggcaagaagatgaaagaaatggccatgaagcactcatgacaaaaatcaaaaagttgacaggtagtacagagcgatatgatcaaaattatgctggaaacaagcctgttaaatatcagcttggattcagctttcattcgcatctgcctgaactgcacatatttcacactgaagagaaaattgataatcaagttgtgaagtctatccacgatgcttccttggtttcaacagcccaaagaatttcttgtaggcctgaaacccatatttctaatgactatgggaataatttcctgaattcttcattattcacacaaaaacaggaagtacatatgagggaaaaatctttccaatgcaatgacagtggcaaagcctataattgtagctcactcttaaggaaacatcagttaatccatttaggagagaaacaatataaatgcgatatatgtggcaaggtctttaattcgaagcgatacgttgcacgccatcgtagatgtcacactggtgagaaaccttacaagtgtaatgagtgtggcaagaccttcagtcagacatattacctaacatgccatcgtagacttcatactggagagaaaccttacaaatgtgaagaatgtgacaaagctttccatttcaaatcaaagcttcaaatacataggagaattcatactggagagaaaccgtacaagtgtaatgagtgtggcaagacctttagtcagaagtcgtaccttacatgccatcgtaggcttcatactggagagaaaccttacaagtgtaatgagtgtggcaagacctttagtcggaagtcacattttacatgccatcatagagttcatactggagagaaaccttacaagtgtaatgagtgtagcaagacctttagtcacaagtcatctcttacataccatcgtagacttcatactgaagagaaaccttacaagtgtaatgagtgtggcaagaccttcaatcagcagttaacccttaacatttgtagacttcatagtggagagaaaccttacaaatgtgaagaatgtgacaaagcctacagtttcaaatcaaaccttgaaatacatcagaaaattcatactgaagagaatccttacaagtgtaatgagtgtggcaagaccttcagccggacgtcatcccttacataccatcatagacttcatactggacagaaaccttacaaatgtgaagattgtgatgaagctttcagtttcaaatcaaaccttgaaagacataggagaatttatactggagagaaactacacgtgtaatgagtgtggtaagaccttcaatcaggagttaacccttacatgccatcgtaggcttcatagtggagagaaaccttacaaatatgaagaacttgacaaagcttacaatttcaaatcaaaccttgaaatacatcagaaaattcgtactgaagagaatcttacaagtgtaatgagtgtggcaagaccttgagtcatacgtcatcttttgtgtaccatcataaacttcatagtggagagaccttacaaatgtgaagaatgtgaagaagctttctgtttcaaatccaaccttgaaagacataggagaattcacactggtgagaaaccttacaggtgtaatgagtgtggcaagaccttcagccagacctcatcccttacatgccattgtagacttcgtactggagagaaaccttacaaatgtgaagaatttgagttttccatttcaaatcaaaccttgaaagacaaaggagaattcatactggagagaaaccatacaagtgtaatgagtgtggcaagacctttagtcagaactcataccttacacgccatcgtagacttcatactggaggataccttacaaatgtaatgagtgtggcaagacctttagtcagaactcataccttacatgccatcatagacttcatactggagagataccttaaaagtgtagtgagtgtggcaagacctttagtctgaagtcataccttacgcaccatcgtagacttcatactggagaggtaccttacaaggataatgagtgtagaaaaacctttcatgggcagtcagcattttacaaatgtaatgattgtcaccaagtcttgagtaatgctacaactattgcaaatcattggagaatccataatgaagagagatcctacaagtgtgataaatgcagaataaatgcagaaaatttttcagacatccttcatacctttgcagttcatgggtgaagtcgtattagaaaccttacaaatgtgaagaatgtgatgaagctttcagattcaaatcaaaccttgatagtcatagaattcatactagagagaaaccttagcagtgtaatgaacgtggcaaggttttaaatcaaaaagcaaagcttgcacatcatcatagaattcatactggagataaacgttacaaatgtgaagcatgtgacaaagtttacagtcgcaaatcaagcctccaaagacaggagaattcatactggagagaaagcttacatatgtgaagaatgtcaccaagttttcagtcacactcaaaccttgaaagacacaggagaattcctactggagagatagcataaaaatgtaagagtttgtgacaaggctttcaggcataattcgcacctggcacaacatcctagaattcacattggagagaaagcttacaagtataatgaatgtgacaggtctttagtgggcagtcaacacttgtttaccatcaggcaatccatggtgtagggaaactttacttatgtaatgattgtcacaaagtcttcagttacactacaaccattgcgaatcattggagaatccataatgaagagagatcatactagtttaataaatttggcaaatttttcagacattgttcataacttgcagttcatcggcgaactcgtactggagagaaaccttacaaatgtcatgattgtgacaaggtctcagtcaagcttcattctatgcaaaacataggagaattcatacaggagagaaacctcacaagtgtgatgattgcggcaaagcctttaattcacattcacacctcactagacatcagagaatgcatactggacagaaatcttataaatgtcatcagtgtgccaaagtcttcagtctgagctcactccttgcaggatatcagaaaattcattttggagatagttgttccaaatacaatgtgtatagcaaaccatcaagcattaattgacactagagtcagttcagcattgacttgagtttgacttaacattgagttgaagccttaattgacattaaagtgtttatgttaagaggactgggccaggcacagtggctcacacctgtaatctgagcgctttgggaggccagcaccggtagatcacttgagttcaggagtttgaggtcagcctggccaacagacgtgagccattttcccagcctgttttttgtttctttaacaaaaactgatagggatttttttttttttttttgagatggagtttcactcttgttgcccaggctggactgcaatggagcgatcccagctcactacaacctccgcctcccaggttcaagcaattctcctgcctcagcctccagagtagctaggattacaggcatgagccaccacgcccagctaattttgtatttttagtagagatggggtttctccatgttggttaggctggtcttgaactcccagcctcagatgatccacccacctcggcctcccaaagtgctgggattacaggcgtgagccactgcgcccagccccagtgataaggatttttatgggtaccgtgttgaatctaaatcacattgggttatataatcatttaacaatattaatttttccaaaccataagtatgggttgtagctctatgtttctaatcattttgatcaatgtttgtagatttcaaggtaaaaacctctgacctttttacgtttatttctaagtatttcttactttaagttctccagccaatggaagtgttttaaaattttcttttaaagttgtttgttgttaaaagtatggaaattcaactaatttttggtgctgatactgtattgtgcaaatccactgaatatgttacttagttccagtagtattttggttgactctttgtgattttctgcacagaagatcatgtcgtctacaaacaaatataattttacttctttctttctgatttcgatgagtttgatttcttctgctatttaattgctctagctaggacagccagtattgattgaatagaaggggtgagagcactcttgcatcatgtgagatcctccaggaaaggcattccattttccctacttgattattcactcattggtcatttcatggatggtctttctattgtttaggtaaatttcctttctatctattttgtttaggatttctatgatgactggattttgaattttgtgaaatgctttttctccctctattaagatgatgtggttttcatctttcattctgttcaagtggcatatcacattgatttgcttgaatatgttgaaccatccttgcatcccagaaataagtggcacttgaatatctacaatcctttttacatcctcttgaatacagttttctagtacaagggatcttgatgaagttcatggaaaaatacatattatgagaaaattgtgcatgaatttcacagtttttgcaccaaattaaactggtacaagtctgttataacatgtctgaacaggctgtagttgaaggcactcagaaggataagacataagtttgaaaagagactctatcaaagtaaaataaattctgctaaaattgaaacaaaaagaaacatcaaatttatgatgagatcagatgcagtgtcaccacaccctgctaatttttgtatttttagtagagatggggtttcaccatattggccaggctggtcttgaactcgtgacctcgtgatccacccgcctcggcctcccaaagtgctgggattacaggcatgagccactgcacctggcccacatcagttttacaaaaaaaaattaaccttgtttgtgccgcaatgaagaggactgacaggtaacagcagaaatagtagtcaggagttcgagaacaggctggttaacatggtgaaaccccgtctctactaaaaatacaaaaattaactgggtatggtggcagatgccagtaatcccagttactgggaaggctgaagccagagaatcacttgaacctcagaggcagaggttgcagtgagccgagatggcgccattgcactccagcctgcgcaacaagagcgaaactttgtctcaaaaagaaaaaaaaaaagatgtcaagcctcttctcttcctctctccccttgtggtgtgtacttgactctgcctctcaccagatcttcttataagactttcaggattaagcgattcctggccaagaaacaaaagcaaaaccgttccattccccagtggattcagatcaaaactggtaataaaatcaggtacaactttaaaaggagacattggagaagaatcaagctgggtctataaggaattgcacgtgagatggcacacatatttatgctgtctgagcattacaatcatgttaccatatcaagctgaaaatgtcaccactatctggagagttggacatgttttattgggaatatattttttctctctgaatctgttaggaacatgttggttggctgggttcagtaataaatatgtgaggcttttcatttaaaaaaaaagtcaaatgatgtaattgcatagagtaccttagtttctgtattgctttttaggtttttttttttttttttttaactccactgggtcagtggatcacacctgtgatccttgcactttgggaggctgaggtgagaggattggctgagaccaggagtctcctgggaatcttctcgtctcctgtaacccagttcacgacagacccttggactttactatattggaaaaatctacataaaacaatgtcagtgtgtcaaagcattatgtctgtcacaagcttgtgaaaggaaaataaaaattactaagccaaagagaaaagtcaagctgggaactgcagcagacaaacctgccttccattttattcttaaacaagatagctagaaagacaaaaaaaaaaaaaaaaaagctacatagaggccgggcacggtggctcatgccgctaatcccaccacgttgggaggctgaggcgggcggatcacctgaggttgggactttgagaccagcctgactaacatggagatatcccgtctctactaaaaacacaaaacttggcaaggcatggtggcacatgcctgtcatcccagctactcgggagggtgaggcaggagaatcgcttgaacccaggaggcggaagttgcagtgagccgagatcgcgctactgcactccaacctggacgacagagtgagactccatctcaaaaaaaaaaaaaagaaacttgcagcaaacatggtatgatataaaaatcctttgccacaggggagaaccaggtatgataagttgctacatggagagcaatatgtgagtttctactctgtcttcgggtgccttcccagagatgcccccacattttcctacagcagtggggatataggatggactgaccctccccaccacacacacacacacacacacacacacacacacacacacacacacacacacacaccccccccccccccccccccggggaaaagcccatataaagcagttcccatttccctccacaaactgcgggctcccagtgaaaactaccttatagactttcttgcaaatcccattcttttctggccttctacgggatgacaggggcctagagaaggcagtactgggtggagttacctgggtgcgcatttgttgggatgtggcattttatggctattctaaggtctgttatcagttgtctgtcttggggagaatgtgcagtcgccatggtccaataatcctctatccaaggaccacacaggtcaccacaggtgctcaatcagtgtgatccacatggtgtgatgtgtgctctggcagggcacagatggacacactcagctctgtcaatgtgtaaacagggagtgctgcaatgacatggtttattcacagtcaccatggaatctgatgtggcattttaaaaaatgcgtagatctattgcaactgttatgaaaacatcactgattggccacgcacggtggcttacacctgtaatcccagcactttgggaggttgaggcaggcagatcacctgaggtcgggagtttgagaccagcctgaccaacatggtgaaacttgtctctactaaaagtacaaaattagcctggcatggtggcacatgcctgtaatcccagcttctccagaggctgaggcaggagaatcacttgaagccagttggcagaggttggggtaagcggaaatcacgccattgcactccagcctgggcaacaagagtgaaactccatctcgaaaaaaaaaaagaaaagaaaaagaaaaagaaaacatcactgattggtgaaagctattgaattagacagaaatgtaactctgcaaatatatatttaaatatttaatagtgaacagaatatctgaatggtgtgtatatacatatatatgttgtatgtgatttcagatgcaattttagatattctatgaaattgtgtaggcagaaggatacacctcaaactggtgaaaattatgtgtagatataaatgactactttttattttagtgtttaaatattttattacgtttgttgaggtgtgtattaactttctaatgaattaccacagtatagccagcagtttactacagcactcatttattttctcacagttcacagatgaaaaatgtgtcaggtttttctgggtactctgtctagtctcaccaggccaaaatcaaggtcaaagccatgggatcgactcttgagactgtgggggcagaattctcttctaagctcattcagattgttgtcagaattcatttctttctcctggtccccatattttcaaaatacagcatgtgaaattactctcgtgctcctgagtcctgacttcctccactattgcatctctctgacatatatttctgcttcaaggacacataggacccacccagataatccaagataactttcttttgttttgttttgttttttgttttttgtttttgagactgagtctggctctgtcaaccaggctgcagtgcagtggtgccttctctgctcactgcaacctctgcctcccaggttaaagtgattctcctgcctcagccccccgagtagctgggattacaggcgtgcaccaccgtgctggctaatttttatatttttagtagagatggggtttcaccatgttggccaggctggtcttgaactcctgacctcaagtgatccacccacctcggcctttcaaaatgctggcattacacacagttttttctttcaaagtcaaatgaggccaggcatggtagcgggtgcctttagtcccacctactcaggaggctgaggtaggaggatcgcttgaacgcaagaggcagaggatgcagtgagccgagatcgcaccaatgtactcccacctggccgacagagcgaaactcagtctcaaaaaataaaataaaattcaaatgactagtagccttcattaattaataaattaccagacaaattcctttttgcaggtaacataaacaagattagcaccaggagttggagacctgcctacaacattataggaccagtaaacctttttgcactgagaaaataatttgtcaatctagctagaaaattattaccgtctgggatatttcggttaagagaaatttgtatactatatattgataaactgtatttgtaatactctattttacatagttatataactatacatcaatataattaactatacatcaatataattatatagtaatatatatttaaatattggtaaactctacgtttctatgaaatttctatattatttggtattcagttgtgctcacgtgtccattgatttcttttcttttttttttttctgagaccaagtctcgctctgtagcccaggctggggagcagtgttgtgatctcagctcactgcaacctctgcctcgcaggtttgagcaattctcctctctcagccttccaggtagctgggattacaggcgcgcaccaccacgtccagctaatttttgtctttttggtagagacgaggtttcaccatgttggccaggccggtccctaactcttgacctcaggtgatctgcctacctaggcctcccaaagtgctaggattacagacgtgagccactatgcccgaccaggtttctttcatttttaaaagacttttaagttcaggggtacatgtgcaggtctgttacataggtaaacgtgtgtcatgggagtttgttgtacagatcacttcatcaccaggatataaattctagtgcccactaatcatatttcctgatcctctcccttctcccaccctatgccctccaataggccccagtgtgtgttgttcccctctatgtatctgtcttctcatcatttacctccctcttataagtgagaacatgtggcatttgggtttgtgttcctgtgttactttgctaaggaaaatggcctccagctccatccatgtccctgcaaaggacatgatctcgttcttttttatggctgcatagtattccatggtgtataggtaccacattttctttatccagtccatgggtgatgggcattttggttgacttcatgtttgctattgtgaatagtgctgcaacgaacatacacgtgcatgcgtctttacaatagaacaatttatattcctttaggcatatatcctgtaatgagattgctgggtcgaaggatatatctctctttaggtctattttgtggaaagcagagtgggaattcaaaaatttctaatgtaaactaacggcttcatgttcttccttttacttcctttcatgtctttcaaaatccttcttaggtactttgcctgattccatttatctgcatataacttaaaagatcaaaggtctaaatattataaggaaatctactttgggtggaaagacttctcagggaggcagagaatccactgagacatacgtagtgtgcgttcagtccctgatgtaccagagctcagtatttcctgcttccttcttgtgagaccctctctgcctccagggatcaaggagaagaaagaatctccccagacactccaaaatccctttggagatgctacccgcgaattagtacatgttttcttggtaattataacagggaaataaaagttttaaaaatataatagcgtcctggctgggcacggtggctcacgcctgtaatcccagcactttgggaggccaaggcgggaggatcacgggtcaggagatcgagaccatcctggctaacatggtgaaaccccttctctactgaaaatagaaaaaattagccgggcgtggtggcgggtgcctgtagtcccagctattcgggccactgcattccagcctgggtgacagagtgagactccatctctaaataaataaataaaaatatagtagcatcctaggactgcactgtcatagctgtgacaggtaaaatgatcattgcggttgtgacagcaggtgagtacacagaaccacaatcccatatctagcagcctggctgctgccctctcatataatactgactggcatgaccagcacactgagctcaccatccagacagaaggatgggtgaggtgactgttttatacttcactttgacaggtagagtatggaatagaaggaggtatataagaagtccagatatggccgggcatcggggctcatgcccgtaatcctaacactttgggaggccaatggtggggggggcggtggatcacctgaggtcaggagttggagaccagcctgcccgacatggcaaaacccatctgtactaaaaatacaaaaattagccgggcttagtggtgggcccctgtaatcccagctactctggaggctgagacaggagaatcgctagaacctggggggcggaggttgctgtgagccgagatcactctacttcactccagcctgggcataagagcgaaactccgttgtgggaggaaaaaaaaaaaaaaaaaaaaagtccagataagtgatcacatcaagaaaagcgaatcttaggggtttgaaactagtttaatgtcaaagccacacaggaaggaggaataattcctgaggcatgagttgagccaggaaagagagttggggactgtagaccctataccagtccctgatagctcctaatgtagtttagtttaatccttcaataataatgatttttttggtgtttaatccacatgataatgaaacctgggttttaaggtgcttgaagactggaattctaaaatctatctgtggttcagcctactttacacaaatcatagaaagagttttaaggataattagaagtatgcccttatgacccacatactggaaatgattgggataaatctacaagaattacctaattctgtgcagaatccacaccctcaagtggcagttctggggctagaaatgttatctcaaagtctcctctttgaagggctaaatggagagtcattgtttctctattgaaaacataaggagtctgttgattatggtgagactcttttcagtcttgaagttaggaaggcaacatttagggaacaggaaagttttaataatcagttttagatagcagttgtcagtcttgaattgtaatgctgttgtctggcttaaaagaaagtctaatatccggctctgatcacaacaattcggtaagttggtgaggtgatgcatacgttaattagcttgattgaatctttctacaatgtatacagagatcaaaacatcccattatatcccctaaatagacacaattattggccaattaaaaataaataaatgtggccggggcagtggctcacacctgtaatcccagcactttaggaggccgaggcgggtggatcacctgaggtcaggagttcgagaccagcctggccaacatggcgaaaccccatctccactaaaactacaaacgattacctgggcatggtggcaggcgcctgtaatcccagctagttgagaggatgaagcagggagaatttcttgaacccaggaaggcgaaggttgtggtgagccgagaccatgccactgcactccagcctgggcaacacagccagattccgtctcaaaaataataataaaataaataaataaatgtggccgggtgcagtggctcatgcctgtaatcccagcactttgggagaccgaggcgggcagatcacaaggtcaggagattgagaccaccctggccaacttggtgaatccccatctctactaaaaatacaaaaattagcttggcgtggtggcgcatgcctgtaatcccagctactcaggaggctgaggcaggagaaatgcttaaaccagggagtcagaagttgcggtgagccaagatcgcaccactgcactccagcctggtgacagagcaagtatccatctcaaaaaataaaatataaataaataaatgtaatcaaatccaaatctaccatttcagtttatcaaatgcacaagattccatgccttacagatttaattttttatatatgttctatattaacaccttttacaaaactcacctcaacacttattgttttactcaatttatgtattcattaattgatgagtatatgaactgaaaattgtggggaaaagaaggagagatcagactcttactgtgtctatgtagaaagaagtagacataagagactccattttgttctgtactaagaaaaattcctctgccttgaaatgctgttaatctgtaaccctagccccaaccctgtcattgcagagacgtatgctgtgttgactcaaggtttaatggatttagggctgtgcaggctgtgctttgttaaaaaagtgcttgcaggcagtatgcttggtaaaagtcatcgccattctccagtctcgagtacccagggacacaataccctgtggaaggccacagggacctctgcctaggaaagccaggtattgtccaaggtttctccccatgtgatagcctgagatatggcctcatgggaagggaaagacccctaccccgacacccataaagggtctgtgctgaggaggattagtgaaagaggaaggcctctttgcagttgagataagaggaaggcatctgtctccagctcatccctgggaatggaatgtctcagtgtaaaacctggttgtatgttctatttactgagataggagaaaaccgcctcagggctggaggtgagacatgctggcggcaatactgctctttactgcacagagatgtttgtgtacgtgcgcatcaaagcacagcacctttccttaaacttacttatgacagagacaccttcgctcacatgttttcctgctgaccctctccccactattaccctattgtcccgccacatccccctctcggagatggtagagatagtgatcaacaaatactgagggaactcagcaaccagtgctggcgcaggacctccttatgctgagtgccggtcccctgggcccactgttctttttctatactttgtctctgtctcttatttcttttctcagcctctcgtcccaactgacaagaaacatccacaggtgtagaggggctggcccccttcagaaaatagacataatttaattttatttatttattttttttttttgagacggagtttcactcttgttacccgggctggagtgcagtggcacgatcccggttcactgctacctctgccttctggtttcaagcaattctcctgcctcagcctccctagtagctgggcttacaggtgcctgccactattcctggctaatttttgtgttttagtagagatggggtttctccatgttggtcaggctggtctcaaactcccaacctcaggtgatccgcccacctttgcctcccaaagtgctgggattacaggcatgagccaccacgcccagccatgataatttaatttctaccctactttattttatgatgccctagtgtttcacgtcatgtagttaagacatgatatcagaatgtccattaattcctgtggtaggtgccatcgtactttccttcctggcataagaagaaatgagtctctgtgtggctgtcctgatatggggtcgactttttaaacctactttagtcatgaggcagattcctgtaattttatactccaatcagtgtatctacattttatcaaggtctttaaagatttattcataattggtatcagcctctggggtaatgttttacatgtcaatggaaaccggtgaaaaataaaattatgaaattaaatgtcacctgtgtaaaatataaagaccaggtataaaatagaaattaaatatgtatgttcattattggaagaaccccgctaactggctttgacagtagagcatggtggttaatgcactctgaaatcagcccagacaagatcagtccccattctaccccaaacatggtgtgaatttacacaaatcatgtcacctctctgtgcttgagtcctctttgtctttataatggtggtacctggctcatcgattatgaagaatatggaggtgaatacatgtctgttcttcacagcaaagagcaattcattgcaaatacacttaaaataggacacatccaaatatggcgaattcttcatactagaaagtaactttattatttctgttgcatttcagctgggtttatttttatttttatttttatatatttacttatttatttattttgagacggtgtcactttatcatccaggctggcgtgcagtggcgcgatcttgcctcactgcagcctcaacctcctgagttcaagggatcctcctacctcagcccccaccaagtaccagctgcctttttaatgtcactcatgcatcacgttccctgcaggatcctgtgtctctgaagataagtagcagcctgtgagaactgacagaatggctgctgggatgtggccatgggaatgatcttcttatcacagactgtacttggaatcctgggaatttctatcttatttaccattatctgtccttttacatcactgggtgcaggttaaggtccacagatttgatgatcagacacctaattgtagccaacacgttattcctcctccctagaggagtcccacagacaatggcagcttttgggtttaggcatttccggagtgattctggatgtaaatttcttttttgtgtccacagagttgtcaggggagtgtccattggcagcacctgcctcctgagtgtctcccaggccatcaccatcagccccaggagctcaggtgggcagagcttaaagggaacgcccccaagcacgctggctcctgtgtgttcctcagctggctcctccctggtcaatatcattgttctcatgcacgtgaccggcaagtggagcaacaaaaataccacgaagacaaaagatctgggatactgttctgctgctgatcacgagggcaccagagagtcgctgacgcggcactgctgtccttccctgatgtgatctgcctggggctcatgctctggggcagcagctccatcgtttgcatcctgcacaggcacaagcggcgggtccagcacattcataggaccagcgtgtcccccacatcctcccctgagtccggagctaccaaaaccatcctcctggtgagcacgtttgtgtccttttacactctctcttcacctttcaagtttgtttggctcttttgaataatcccagtcagctggtggtgaacatctctgcaatgatcagtgcaggtttcccaactgtcagccgctttcttctcatgagtggagactcctgtgtatccaagctttgctttgcttagataagtaacacaaaaccccctaatcttatcagaaatatgtgaattggacatgtttgtacaatgtttatgtttcttcattgatctctagagacccataaacacggttatgaaacgaggcttgttagtgctgtgcttgccagcaggggccactgttttattctgtacctcctgatcccccctccaaccacaccgccctggagcagctctgtggaaaaagtggaatcagcttagaggttttggagaggaagatactgaaacgtaaacgatataagaaagtcacggtgcacaaatatacatacctcatttctgtgtcccttggagcagatgggggaatgtgcgcagatgcgaagctcttgctgtaatttatgtgacaaataataaaatatatgttttgtcggatccagaaatctcatgccttcagccaacatccataaactgacagtctaacttgttggcttgtaagtaaggtaaaaatctaaaactggccaggcgcggtggctcacgcctgtaatcccagcactttggagggccgaagcagacggattaactgaggtcgagaatttgagaccagcctgacaaacatggagaaacctcatctctactaaaaaaaaaaaaaaaagaaaagaaaaaagaaaaaacattagccaggcatggtggcacttgcctgtaatccgagctacttgggaggctgaggcagcagaatcacttgaatccaggaggcggtggttgcggtgaaccgagatcgcgccacagcactccattctgtgtgacaagagtgatactctgtctcaaaaaaaaatctaaaacattttgcaatttctgatagttttggtgatgctgagacagatatgactttgtgtaagaggaaggtagaaagattcttcactggcgtggttagtaggcagaaaatggctctctggaacaagcagcgaattctcacccaaactgaggtgaaatgacagtaagacttctccattcttttttttttttttttttgagacggagtttcattcttgttgcctaggctggagtgcaatggtacgatctcggctcactgcaacctctgcctcccaggttcaagtgattctcctgcctcagcctcccaaatagctgggattacaggcatgcgccaccaagcctggctaattttgtattttttagtagagacggggtttcaccatgttgttcaggctggtctcaaactcttgacctcaggtgatccgcccacctcagcctcccaaagtgctgggataacaggcttgagccacagtgcccgaccaagattcctccattctataacccttgaatgggactgttgtgtgagagggaggattgaaatgaactgtccgaatgtgatttatctgttgctcattctcttcctggcaggagcaggaaaggacaaggagtccccgaagctgacactgagttcatggggttgagctgacagcggccaacaggctgtggtaaacgctaatgaaacgagccttgttagtgctgtgcttgccagcaggggtcactgtttccttctgtacctcctgatccctccctccacccacaccgcactgcagcagctctggggaaaaagtggaatcagcttagaagtttttgggaggaagacactgaaagtcctacttttttttttcagatgggatctcactctgtcggccaggctggaatgcaatggtgccaacttggctcagtgcaacctccccaccccgggctccaacaatcctcccatctcagcctctgaagtagctgggactacaggtgtgcctcatcaccatgggctatttttatttttgtattttgtagaggcaaggtcttgccatgtttctcaggctggtctcaaactcctgggctcaagtgatctgcccacttgggcctcccaaagtgctgggattacagacgtgagccaccgtacctggcctaaaactcttttactcctgttgcatgcaaggatttaagtcaccaacgtacgtggattccagcaagaagggtcagtagacgcaggggtgggtaaaggtgctaaggatggtggggtgaagtgtggctgcaaacaggcagaaagagacaagcttctgaccctgaatagtcaccaaatgctggatggtgcaatgctaagaatgcagcacaggccgggcgtggtggctcacacctgtaatcccagcgctttggaaagccaaggtgggtggatcatgaggtcaagagatcgaaaccatcctggccaacatggtgaaaccccgtctctactaaaaatacaaaaattagctgggcgtggtggcatctctttgtctgtgtctttatttattacaatctctcatctccgcatacaggcgttatctcctgtccggggaagaggtgggcctctctccgtcgtgggaggagctctgaacttctccttcatccagggatgggccccagggacccaccagtggggctgggagaagcccccctcagcaggaagacagaggtgcctgggtggccgaggcctggaaggtctgcaccatggtgcacagaggccccggagctgggtgaggccagaaagctgctctggggtcagcggggaatgtgcctgctgaatctgtacctgagctacgtcttcacaaatggcctcagacctagagtgcagggagatcccctggcttttctgaagtggtggcaggtggtctcctgggtagcaggatctgggctgcttacttcccttacccagtgagggcccgcggggagctcttaagttgggcatcatggggctgcgtgatgtggctgctgtgcccacatcagagggtttttgtttcttttccaaagtcaagctgcactaatctagaccagggatccccacccctgggctgcagaccggtccccatgggtggcctgttaggaactggaccgcacagcaggaggtgagcagtgggtgagtgcgcgtgaccacctgagctctgccttctgtgagatcagcagcgccactgcatctcagaggaatgccaaccctactgtgaactgtgcatgcgagggatctgggttgcatgctctttatgagatcaaactaatgcctgatgatctcaggtggaacagtttaatcctgaaaccatccccccatctgtggaaaaactgccttccactaaaccagtccctggtgccaaaaacactgggaaccgctaatctagacagttctctgctaaggaagcacgtggttgagaagcatcagaatcgttcccacggaccatgctccggagtctcagcaggctcctgcaggtgagccccactggcctctcctcttccttccggacctcctcagctttggtaatggaaagctgcatcctcttctgtccccagttcctctctgggtgtcaggatctctaaaaccctctcagccgctgagaagtctgtctgtctgtctcacagtgtgtttatccgtgcatcatgaaggaccctcatacggctgacgtgccttggctgatgcgaataacactgcagcaagcgtggcagtgcagatagctcttggaaatacccatttccttcagacgcatactcagaggtaggattgctggattgtttggtcattttgatttttaaaattaaaaagaattttaattctcatattgttttgagtaaaattaaattataacttgtaaggcaactccatgttttttagaatttttaagaaaaataattgctctaccaattgactgtcccaacaacaacgtacaggggtattttttttcctccgcatcctcaccacttgttaccttttgtctttttaataatagcaatcctaagacatgtgaagtgatacctcactgtgattttgattggcattttccagatgattagtctattcaggccctttacttttttttgttgttgttgttgtttttgagatggattctcactctgttgcccaggctggagtgcgatggcacgatctcggctcactgcaacctccgccttccggggaggcgtgattagccaccacgcccggctaacttttgtattttagtagagatgaggtttcaccatcttggccaggctggtctcgaccccctgatctcaggtgatccactttgcccagcctcccaaattgttgggattacaggtgtgagccaccacgcccagcccctttgctcttttttaatagggttattactattaccatatttgcttttgagttgtgagtgttccttatatattttggatataaactccttatcacaggtatggtatatatggtttgaaatattttctcccattatcatgccccaatatcactaagttacatttcactgctccctcttgaacacctgaaaaaatttcctatttccatgtgtctgtatccaggttattgtcacttttacctgaagacacatttatatatgctgatattccccaataactaatatatttttactcttttttttttttttgagatggagtcctgctctgtcacccaggctggagtgcagtggcatgatctcagctcactgcaacctctgcctcccaggttcaagtgattctccttcctcagcctcccaggttgctgggattacaggcacatgccaccaccactagctaatttttttgtatttttattagagatgcggtttcaccacatgggtcaggctggtcttgaactccggacgtcatatgatccacccgcccttggtctcccaaggtgctgggattataggcatgagccgctgcacccggccctaactaatatattttaaataactttttgctcttggcacatggactaaaaccacatcaccaggccttcaatgacgtccaatgtctgccatcttatttccactccagctccgccccaggcatagttgcctttctttttattgaagccttctccttgccaagttaattaaagagaatgttttcttcatcaaattagaaattacatcctcagagctttccagtatttgtagttcttacaggccacatttattacaagtttatagactccaaacttctccactgaacagttaataaaaaggacacaggcttattgtaaaataattcatttagtgcctgccattctgattacactagaaatttagttctcctgctcagcgttctgttatgtgactgttcaatgcattacttaaaactgcaagattgaatagagagatcagcttctgacactgatgaatgcaaaccacaagaaaccaagtctcctctgcaaaatgatgaaaacactcgcaaagtcactaaaatcaatcatttcagacttctgaaatttaccaaagccacagaacaaagtgaaaagtatctatcccacagaaagtaccaaacttcagtaagacagcagcatttgtgtcattttaatgtggaggcattaccattaccctccatccttcgttcagtgtagagcactgacctcttttgaagctccttttaaacacctcctatcaggccagtcgcggtggctcaagcctgtaatcccagcactttggacgacagagcgagactccatctgaaaaaaagaaagaaaaaaaaaagagaaagtgacttttcaagactgtgatttatggtctcccctgggaaccaacagtatctgtgctgagagcagatatttgggtggaaggggctctggtgtgcagggcatgccttctgtagctcagtgcttctgacaatgggtccgaggggagaaacattggcattaacagggaacttgttaaagatgccaatttataaatgctacctcaaacctgcagaatcaaacattattacagtgggttgtggagtgccagatgacttatattcaccttaaagcttgagagtcagtgcttagctaagaggctctcagcccaggcttccagttggatcaaatggtcatattcagttactaccatcacctgtgccctccccatagcgtctgtctattggtgtcgggggaaacatccatgctgtttcaattaactaccctgcccccaggtgattctagggtgaggagaagtccagcatgagggcttccatatgcatttgtgaaggttgatggcagactgttccaaatgagaataatggtttccgtgatatgataaaagcaatgctattgaatatgatgatgactgatgagaagttttgcatagcattcgctgtaaaaaagccacttataggctgggcacggtggctcacgcctgtaattccagcattttcggaggctgaggtgagcagatcaccggaggtcaagagttcaagaccagcctggctaacatggtgaaaccctgtctcaactaaaaatgcaaacattagccagatgtggtggtggatgcctgtaatcccagctacttgggaggctgaggcaggagaactgcttgaatctgagaggtgtaggttgcagtgagctgacatcatgcctctgcactccagcctgggtgagagagcaagactacgtccaaaaaaaaaaaaaaagagagagagaattttcctgtaaataattaaaaagactaagcagccccagagataagacctcctgggatcattgtccctttatattgagtgataaagtaaccttccttgaagtatatcaatccataaccaatcaccttgctgcaccctatgtactggtcttgaatggaaaatgtggtgattcttctaaagcttctctgtctttccgtgtgtgtgaaacctaagggaacgctgatcccattcatttggagttgatgtttccaggtggctatcctcatgctttgtgttcaaataaactctgtgcttaatcatatattctaaattttattatttactgctgatatcagtttctgtcagactgtaggagcctcaccagagagggcacctgtcgctatgttgtaaaactcacacttgtcagaaagacatgggttagtgttactccccgtccctcagaatgaagctaattagctgacacagatggtcacctccattaccaagtagagtcaggatgaactatgtgtgaccaagagtgttgtcaagtcctcttccctgaggactgattagcgtttatcttgaaaacatgtccttaatgggttgtatagaacagtaaagtttctttctcttttttcaacctcttagctgtttgcctgtatttcgcatcacaatctggtctaaggcttatttattaatgaaatggttttaatttctttctctatgatcatcgtggagatgatttctcatttggagaaagactttttgtttgttttcaattatattttctcaacaattagacagtgaagtaaaaagtattttgggggggccaggcacagtggctcacgcctgtaatcccagtactttgggaggccgaggcaggtggatcacttgaagtcaggaggttgagaccagctggccaacatggggaacccacctacaaaaatacaaaaattagccgggcatggtggcacgcgcctgtaatggcaggtactccggaggctgaggcaggggaatcgcttgaacccaggaggcagaggctgcagtgagcccagttcctgccactgcactccagcctgggcgacagagaaatgctctgtctcaaaataaaagaaaagaaataagtaaataaataaaagaaagtaatagatctcttctacaaatgtgctgggacaactaactggatatccacatggaaaagaataatgtatccctatctcacacaatcaaaattttattttaacgttaaaaaatggagaaaaaaagagagagagacgagggagggagtcctgagggaggggtgttactttgtcgcccaggctggcctggacccccaggctcagcgatcctctcgccgctgcttcctgagtagctgggaactcaggctcccgcccccgcgcctgaatccttgctgtgtttatccagcaggtcgcccctggctggcctgagcattccgtcccgcatcccagggggaggccctagggaagtctctgcagctgagcacggggtggactctccctcctgagtgagtggagaatagaaagggagaggatttctgttctgttctgtgggccgtcagcatgaaatcgtacgttccgcccaggcagggccttgcattttacattctagtttgtatcccgttccagacaattccagggcttttgagtccatgcgtcagccttcctgggcggtctcaccttcaccacccgaaaacaggtgctaggagagaagctgagaggagcaccggtcacgccccggccccgccctctgccggctctaaagcgcaaggtctctccgcctcgcgccccgcccctgcctcgtccaggccccgcccacctccttgcgggtcccgcccaggcctggcttctgctctgcgcgcgcagattcgtgcagaccaggaagcggatagcgtggagtgacggtgccaccgcggcgcgtgagtttcgccctgtcttgtattaagtctgctcttccaggttcctggcgcttctgtacctgggacttgggatccccacaaacctggaaattctcagccgtcttccttcactcagagcaaattgagacgacctcgtgagaggccgtgggtcggttccttttgggtttaaggtccccctgaggctggtcccgtcccgggtgtttctgctacagggcaatgtatacactttctaacctgtagttttcctgctgtaaacctttttctgactcctcccgccccgcgctttttaaagtcctcacctgagaggtggattctcgcctttgtcggcccctggagcccagcgccgctgccccagtcccggaaaggccgcgtcctctgcctggtcctaggatcctgcagaccccacccttgccttaaggtgctgtcgccccttcacctccctccttgtgccgggccctgctgctccacgggtttcgcctccacaatcaccgcttcccctgagcccgcgttggggaggtgcccggggcctgtcctgtgacgcggggtgttactgcctgcccagctccagcccctggaaaatgcgctcccccgggatgcaggcgtcttactccaaaccctcctgtgactgtgtgggccaaagggatcaggagacggacagagagcagtggaaaacctgagacagaaaagaagaatgagaaagacctataacagatggcaaagtagaggatgggtgagggatttgccaagagacagcaaaagtgaaaagaaaacgataagaaagcaggaggagaaaagcaagtgcagaaatgtagagaaaagctggatgtacagagagatgaaggacagcaaggtagggagagggacagcaaagagggaggctcatcagggtgagggagaggaggagggatttggagccagggcagacagagcagagtggtgctggtggcaaggagaacagagggagaagcacagcagggaggacacctggggatctggggtgctagagagtggggacaggggggtataacagggaagagagaatttaacggggagagcaaaggaggcgcagagatggtgttgcgggaaactgaggactagacagactgatatgggggagacaaaaggatgtttatttaagatacgcaccggctcagtggatttacatctaaaaagctgagcatttcaacaaagacggagtggggttttttgctttcagaagcagaataaaagcagttaatcatataatgataggtcatgtaatctatagcatagcataacttgtgtccttccatagctggtggcctcgtagctgagttgaaagaaaaacaagaacagctaaatacacacatttgtcctttttttttttttcttcactcttgttctgggaaggtggggggctgtctggagcccatttctttggcttcgacttcgccaagtcgagcttgctaggcagaggaaaacttgttcttcttttctttttaacccttgccttgcctgttacttttcttggagtgaatgaatgcatgtttgttttttaactttctgcctcagttttctcccttagatgccttttatgaacaagattttactagaagacatcactattactggattcttcatgaaagagcactggctgatatttatatcgggctattagctgagtggtagtctgcctggtcgcaattgcttctatagttgattgaatgctcttaacacggagaggtaagaggtaagggagtatcaaaccaattcttagtatggctagaactactcctattaaggttttgaatctactgaaggaggaaaaccagcctctaaagacggactcaagagtctattttgtctaagtccggactggaacgtgggctaattttttcattcttacagttatttctttaatagccttcctattgtcattgatttctaggcagcaattagttagattacactttctacatactcctccttcctaggctaggaggtagtctaaagctaatctattttggtagatggcatttctcgtttttgtggcttgctgggccagtaagtctaatgcatttgctgtttcattagtgatgatttcaagtactgcttgcgagtttatgatgcggttaagtgtgtaaattggggtgcaataccttcgtgacttatcttgtgcccaggtagctggcctagagtactgaattagtctttcaggaggcaaatctgtgtctttctaatcttctatttctatgtatttccttatgtctatatatcttttgtttttttctttaattttattgtagacaggataccttcaagtttctccctgttgcagtgggagtaagaagaaagatggtctaattgtttcaagtacactagcccttgtccattttcctggcaactgtcggtaggcctgtggcccacagatccaatagagaccagagggtgcttgccaggtatttggagcttcaagctgatactaggtgtggtttagagaagagaaacaggagaatgggtttggatgaggtgatctggagtcatctttgccttgccacaaagttttctttagtgttttattataatattgctgtcttaaacaagttaattcttccagtgagtctgtaaaagcttttccttagtgagcaacccagtatctcctgataatagaagtttttaagagctaggtgcttgaacttgtgggcatcggttcgggggaagagtcagttagagttaaattatcttgtggcattaactcttttgcttcttaaggccattggtctactatgttcgtccttctacaaacaacatgaggaaatgcttaagctgctagcaatcaatgttttcagctaaccaagcaaacaggtttttagctaaaggatgatgctctggtaacttctggtctacatgcttatggaatgatttaaagactcggaattgttgctggtccgggttcctttttgataacatataggtaggttgctgggtaggtgtgtgtggagacacgtatggggtaacctgcagtccgcatgggtaagtctggctttagaatggtgaaatttacaggattacaggttggacaagcatcaaaatacagagaaataggccatcggtaaaagggggggaccttggtttggtttaagaggtgactttcttttgaccttgcacgaatttaaactattcaccaggtgaaatcttggggttataacatacataaggttggttatttcctggtcacaaattgagtaactgagtaggtcgtctggctataaatacaagtccttttttttttttttttttttttttttttttttgagatggagttttgctcttgttgcccagtctggagtgcaatggcatgaccacggctcaccacaacctccacctcctgggttcaagcgattctcctgcctcagcctcctgaaaggctgtgattacaggcatgcgccaccatgcctgtttaattttgtatttttattcaatacggggttctccatgttggtgaggctggtctcgaactcccgacctcaggtgatccacccatcgtggcctccaaaagggctggaattacaggcatgagcaactgtgcctggcctttataagtacaagttcttaagtgagtccttgtacactcataataagtatggtgcagtagagtcttagttatcctgttccctgaccaggtagtatgtgtacagtggggacacatttctatagttgcttcttctaccatggttaaggggggtgacaacagcaaaacagtgtacagcatgttcatatccagcaaggacagaagagggccttgcctggcagaggaggttgagcacaacgacagaacaataataaaacagttagtattacaaggaaaactactagtcttaagatttctaaccacatttacttgcttgacgagtcctcaagcttcggccgtgcgtagactagtcagcttctggtgtgtgactagagctgggcttgtcgtcccctccagcttcagctgtgcatagactggtcagcctccagagtgaccagagcagggctgtcgtcctcagcagcagcttggtctcatctcaggatcggctgagttggatgatctgggtcttgctggctgttccacttgtcctgaactgctggtttcagctgactgtggtggacctatggcatgattcctgcaaatttaacagcagtgggagtggacaagattacagtacagggcccatcctatatgagtcctagagaagttggattctactttttaacctaaacagagtctccatgttgaaaggggtgtacttgatctgtcagacttataggcattctttcttgtattcagttatggacttcttgcatggctgttcttaaagcctgcatttgcttgcttaaagttaattcctctagttcttggagatcacctttaatttgacttatgattagggcaggccgactgaacaaactctaataaggtgaatacctagtttgtttggtgggggtgcacctgacttggaggaggaccatacgaaagagctgatcttatctcagatgagtttcttggcagtatttcttcagtagctgcttgagtgtccagttcatgcgctttactttccttgaactttgtgactgatagtctgtgtgtagcttctattttatttttagcagacttgtgaaatcttacactatttcagctacgaatgctggcccattgtctgactttaaaggtagagccagtccaaacctggggataatgtcttttatcagtactttagtcacttcttgcacttttcccctggtggagaaagccttaacttatcttgaaaaggtgcaaataagcaatagcatatacccatagcctctggcacggggcagttcgctaaagtttataagcaagttttcacaaggcacggctcctacttcttgaattcttggggctgagtgggcccctgtcgtgggttattctcagcacaggttaatcattgttcacaaacatcttgagtgacagcagagagccacggcacatagaaatggcactttcgtgacccagcgcagtggctcatgcctgtaatcccagtactttgggaggctgaggcaggcagattatgaggtccagatttgaagaccagtctgaccaacatggtgacaacccatctctactaaaaatacaaaaaaaatagccagtcgtgttggcaggcgcctgtaatcccacctactagggaggctgaagcaaaagaaacacttgaacctgggaagcagaggttgcagtgagccaagatcgcaccactgcactccaacctgggcgacagagcaagactccatctcaaaaaaaaaaaaagaaaaaatggcactacataacgttgctaatgctgtttttcttatatgattttcttgatggatttgcttcacaaacttaggagctaacatctttggaatggctagtctcctatagaagaacttcttttactttcttttcatacattttatatcttcttggcacaccaggatctttgatttggagtataacttgggtcgtcttggagaggaggttctgggaggagaggcatagctaaggcttcctctttaaaatgcagcgtgatcattgctgcctgctttgcctccctgtctgcttttctgtttcctttggcttctggcatccttgccttttggtggcctctgcaatgcattatagctactttttctggaagctatacagcctctaagtgctgtagaatctcttctttgtactttatttcttgcctctagctgataaaagtcctttctctttatatatagttccatgtacatgcaaggtagtaaaagcatacttagaattagtgtaaatactgactttcttctcttttgctagcaacagtgctcttgtcagggctattaattctgccttttgagctgatgttccggtaggcagaggctgagcctctactactgagtctgatgttaccactgtatacctggcatgtccaaactcttccagcacagaactacttccacctgtgaagtacttgacatctgggtctctgaggggtctgtctgtaagatctttctcattgggaaatacctcgtctactgttttgacacagttatggagaagagctgcctgttcgactgggagcagaatagccaggttagggtgtttagtgttctaaagttgtgtaagggttttcacatagaagcccttggtaccaagtcatcctcaggtttgataactaatggtgccttctttgatccatcaaagttatgactgaatgtggcaccgggacagttagttgctgtcctagagttaatttgctagcttcttgtgttaacaagatggtggcagctaatgccttaaggcaaagaggccatcttaacaccatggagtctagttgttgggataaatatgccactgggtgacgccatgatcctataagttgagtcagagcccctatagtcattgttttttgttcatgaacatatagaaagacttagttatgtctcatagtcttaaggctggggcctgggttaaagcttccttgatctgtttgaaggctatttcttggttagttttttaaaagaggggctccttttcccctccttttgtggcgtcatataacagcttagccatcagtgaaaaacttggaatccagatgtggcagaatgttgctgcgtctaaaaattcctatttgtcatcgggtagtcggagttagaagtgcacaaatggcttgcttcctctcatagccaaaccagtgttcctcgtggctcaatatgacacctagatatgtaacctcttcatggaaaatttgggctttcttttttgatattttgtaacttgctttctataggagatggaggagatcctgggttccccgataacactcctctcaggttggggcaggcaaagaaagctcgtctatgtactgcaacaaggcacagttgttacttggcagggtataggccatgaggtctgaggccaatgtttctctaaagattgtgggagagaacggggcatggtggtttgcgcctctcatcccaacactttgggcggccacatggctggatcatgaggtcaggagtccaagaccagactggccaagatggtgaaaccctgtctttaccaaaaatacaaaaattaggcagccatggtggcaggcgcctgtaatcccagctacccaggaggcaaaggcaggagaattgcttgaaccgagggggcagaggttgcagtgagctgagatcgtgccactacactctagccttggtgacagaacaagactctgactcaaaaaaaaaaaaaaaagattgtggtagttgtttttgttgttgttgttgtttttgagatggagtcttgctctgtcacccaggcgggagtgcactggcgtggtctcggctcactgtaagctctgcctccctggttcacgccattctcctgcctcagcctcccgaataggtgggaccacaggcccccagattgtggtagtttttaaacctttgtgggagtctagtccaggagagctgtgacgcttcttttctcttatgaaatgcaaagataggctgactaactggtgccagacagataacaaaagaaagaaagcatcctttaagtctaagactgtaagctagcacttgctggaataagagctatcaaagtatacgggttgggtaccactggatggatagttactgtggcctggtttatagcatgcaaatattgcactggcctgtattcatttgaacctggccctggcaatggcttctgaactggcaaaagcagagtgttctaaggcgactggcattggactaaaatcttatgtttatagagccgttctaaatgcttgcagatgccctgtacagacttttggggaactgggtactgatgaacccgaacaggagttgcttctggttttaattctgctactactggtgcatgatttacagctaaaccaggtgggttgtcctcagcctatactccaggaatttctttagctaactgaaataatgatttttgttcttcttgcatatgaggttgcactggtacctgaaaaagaggctgggtgctgtggctcactcctataatcccaccattttcagagactggggcaagggcattgcttgagtacaggagttcgagaccagcctgggcaacatagtgagacccccccgtcttggccaaaaataaataaataaataaaatgaaccaggcatgatggtgcacacctgtgctcccaattactctggaggccaaggcaggaagatcacttgagcccaggaagtccaggctgctgtcagctgagatcatgccactgcactccagcctggtcaacagagtgagaccctgtctcaaaagaataaaaggggtgggggactttgggttcagatgagtgggtgagttcactgggtatgattacttgtgacatgttgacttctgtgtatataatctaataacttaaaatttgtttaaattatacagatgagattgagaacttaaaaattcctatctataaggcatgtacattgtataaatcttggcatagaggtcagcttccacttggaatccctattcagccagagggcagtgacttattcagttgtgaattactctgttccctttttgcaggatggggtaggaagtggggcaatgaagtgggaaaaaaatctatttctgttattacataatacttttaattaaattaattaataattagtattttgagacagggctggctctatcgcccaggatggagtgcagcatgatctcttctaactgcagcctcgacctcctgggctcaaaccatcctcctacctcagcttcctgagtagctaaggtcacaggcatgagccaccaagtcaggcaagttttgtacatttttggtagaaacgcgtttcactacgtttcccaggctggtctcaacatcctgagctcgaaggatcttcctgccttggcctcccaaaatactgggattacaaggataagccaccacacctggtctacatagtacttttcaaaagggatatcaaaacgtggtggcccctgccattaaccacagcactttgggagacagaggcgagtgggtcacctaaggtgaggagttcaagagcagcctggccaacatggtgaaacctggtctctgctaaaaatacaaaagttagccaggcatggtggtgtgcacctgtagtcatagctactggggaggctgaggcatgagaatcacttaaacttgggaggtagtggttgcagtgagcaaaaatcctgccactgcactgcagcctgggtggcagagcaagtctccatctcacaaaaacaagcaaacaaaaaataaaaaacaaaagggacatcaaaagtgcttttgttttcatgtgtaatagatttactttattttatttctgtttcttcaattctttattttacttatttatttattttgcagtttgagacaaatgttagtttcgggtttttttgttttttgtttttttttttttggcagaatctcacgcagtcacccaggctggagtgtagtggcatgatgtcggttcactgcaacctctgcctcctggtttcaagtgattcttttgcctcaacctcctgagtatgtgggactacagtcccgcaccaccacacccagctaatttttgtacttttagcagagatggggtttcaccatgttggccaggctggccttgaactcctgacctcaggtgatccactcgccttggcctccccaaagtgctgggattacaggcatgaatgaccatgcccggctgagataaatcttagttttcaaaatttcttttttaattcataatcacagagaggagtctgcaatgccgagtggaggaaggaggaaccggagtgtgagcagtagctgggtgggcagcatggctgggatcaccaccatcgaggcagtgaagcgcaagatccaggttctgcagcaccaggcagatgatgcagaggagtgagctgagcacctccagtgagaagctgagggaaaaaggtgggcctgggaacaggcagaggctgaagtggcctccgtgaacggtaggatccagctggttgaagaggagctggactgtgctcaggagcgcctggccactgccctgcaaaagctggaagaagcgggaaaagctgctgatgagagtgagagagatacaaaggttattgaaatctgggccttaaaagatgaagaagatggaactccaggaaatccaactcaaagaagctaagcacattgcagatgaggcagatgggaagtatgaagaggtggctcgtaagttggtgatcattgaaggagacatgggatgcacagaggaacgagctgagctggcagagtcccgttgctgagagatggatgagcagatcagactgatggaccagaacctgaagtgtctgagtgcagctgaagaaaagtactctcaaaaagaagacaaatgtgaggaagagatgaagattcttactgataatctcaaggaggcagagacccatgctgagttggctgagagatcagtagccaagctggaaaagacaattgatgacttggaagataaactgaaatgcaccaaagaggaacacctctgtacacaaaggatgctggaccagactttgcttgacctgaatgagatgtagaatgccccagtcccaccctgctgctgctccttcctctgaccctgactctgcctgaggccagcctgcccgaagctgacctttacctgagggctgatctttaacgggaaggctgctttctccttttgccaccccctccttccctgcctctttttcaccaaactgtctctgcctcttcctggagattccagctgggctagaggctgagaacctttgcaaacaacatttaagggaatgtgagcccaatgcataatgtctttaaaaatcatgttgtgaaaaaaaaaatacataatcacttctgaaagatgcctttgtcacatcctataatcagctcacatcatttttttctgtacaagtatattttccagttatttacctgttgaccccagaatttgttagatttttaaaaaaacaatttctaaatagtttctgtttgaaactagttgcgtccagttcagatcaaggtctgcatgctttctagtctttattatttattggaaaacttcggtacctaatacaaaagtttgattgtttcagtgtgtacctggtaaagaatcagtgaccttttaccttaacatcaaaatgtagtttaaccagttaatgtatttttcagttttctttccttatgt[267 bp omitted]agtgatcaaacaaagcagcaggtggtgaggatgtggggtttgaaaggaagcagtgcatcaagcacatgatctataggtgtgtcaggttaacatttatatggaacatgttctgctacttgagatcatggggaacatattcttctagtttaagatacaatcattttatgagtctgggagtgctagaagcaaagaaccatcaagtctaggcacattccagaggccacgaggggttttatgccctgaaacctggattccatccaagccacaaggggtttgttggggaaagaaagagagatcagactgttactgtgcctatgtggaaagaagaagacataagaaactccattttgttctgtactaagaaaaattcttctgccttgagatgctgttaatctgtaaccctagccccaaccctgtgctcacagaaacgtactgtgttgattcaaggtttaatggatttagggctgtgcaggatgtgctttgtttaaaatgtgtttgcaggcagtatgcttggtaaaagtcatcaccattctccagtctcaaataccaagggacacaatgcactgcagaaggccacagggacctctgccccagaaagcctgggtattgtccaaggtttctgcctgctgagacagcctgagatatggcctcatgggaagggaaagacctgactgtcccccagcccaacacccgtaaagagtctgtgctgaggaggattagtgaaagaggaagacctctttgcagttgagataagaggaaggcatctgtctcctgctcgtcctggcaatggaacgtctcgctgtaaaacctgattgtacattctatttactgagataggagaaaaccgccttatggctggaggtgagacatgctggcggcaatactgctctttactgcactgagatgtttgtgtaaagtcaaacataaacctggcctacatgcacattgaggcacagcacctttccttaaacttatttatgacacagagacctttgcttacgttttcctgctgaccctctccccaccattagcctgtagtcctgccacattcccctcactgagatggtagagagagtgatcaataaatactgagggaactcagagaccagtgccgatgcgggtcctccgtatgctgagcgccggtcctctgggcccagtgttctttctctatactttgtctctgtgtcttatttcttttctcagtctcttatcccagctgatgagaaatagccacaggtgtggagggactggccccccttcagggttttatgccttgggcttaggttgtaatttggcagggcagccttccaccctttggcacagagctgggtgttccaaagaccacaaggggttttaggccctggaccccggcatgttccaagactctttatattatgtcagactagcaagccctgcctcagcttttccccaacatggaacgctgttctaaaagcacccatgattcttttttttcttttttttcttttttttttttttcagatggagtttcgctcttgttgctcaggctggagtgcaatggtgtgatctcggctcactgcaacctccgcctcccgggttcaagcgattctcctgcctcagcctctcgagtagctgagattacaggcatgatccattgctcccagccacccatgtattcctgattgaaaaaatttgcttatgtcttagttctacagctgaccctctttcgctattttcaaggtcaatagctgtgtgttcacacttctgcattttataaatgttactgtgattttcttctaaggaaaaattaaatgtcaggaatcagtggcatcagaaccttgcaaaagaagtttctttagcccaggcctgtgaaagatgcttctgtaattttcaaggataggggtgataaagaccaagccttcccattagcccttccaggcccccatgtaagaattcaggcacaccttctcactcatctcagaccttctcagggtaacttggtgaaaatttccctgctctgagccccagtgagcctccctgcaacttggagatgaggggctagaccagaaaagctcaacccgagtgacccagtcccctgaaatgatcggcaaaatagtgcatgtcttggcgtggcctttcttctggcagaggggagtgcccagctgtaattagaattttaaatgggatgcagtaccccaaaaataaaattaaaaaaaattttttaaaaaaacgtgaaagaatggaagaaatagaggtgtagactcagacacagagaccatcttcgaggcctttctctgtatgaggacatcacagcaaaatctaaagcaggtcacgtcagtccctggcagggaaccctccaccagcttcccgtgttccccagaacaaaagcccaactcctcactgtggctccacagccctgtgaccagggcccctgccagtgtccagcctcctcctgggagcttgccctcatctcatgactccctctgccccagtcacatttgcttttctgttttcccagatatcaaaacccttcctgtctcaggttgctgtccctgctcttaccctatgtccctaaatgatcacggccctgtgcctttcttcttcaggtctaggctcagagatgtctcccatgccctcccaaccccatctgaagttccctctgcccatcagtctctatcatgttactcaggttttattatctctacatcaatcacatcagaatttttttttcttttttttggagacagagtattgcccgggctgtgagtgcagtctcatgatcttgggtcactgcaacctctgtttcctgggttcaagtgattcttgtgcctcagcatcccacgtagctgagattacaggtatgtgctaccacacctggctaattattgtatttttatttttatatatttttttatttttgagtctcacactgtcaccccagactgaagtgcaatggcatgatcttggctcagtgcaactgccacctcctgggttcaagcgattctcctgcctccacttcctgagtagctgggattacaaacaaccaccaagcccagttactttttgtatttttagtagagatggggtttcactgtgttggcaaggctggtctcaaacttctgacctcaagtaatccaccctcctcagccttccagagtgctggtattacagacataagccaccaagcctggctcagtttttttatttttcgtagagacagggtttcacagtgttggccaggctggtctcaaactcctgagcccaagtgatcttcacacctcagactcctaagtagcttggacaaccatgcctggctaagtttttgtatttttggtagagatggggtttcaccatgtttcaccaaactcctgagctcaagagatctatctgcctcagcctcccagagtgctgggatgacaggcatgaggcaccagacccagcatctgcatggggtttggtcagggctgggtctagggacccagggctgggtcaggaaggggagcccattccagcccagctcccactgttgcagcgtgtgtgtgggctcctctaggaaagaagtgcgagttttcctgtggcagtttatcatccctggtgcagtgggcagcagacgggaccatatttcccagggtgaggtcgcctttgtatgtgtggttgtgttccacggaggtggcgtgttgattctgagcaataaacaacatatttctaacattcaggattgacttctaaagactcttggtacgtgaggaagaaacccggaagaggaagaggagagcaaaggagtcagggatggctttttctcaggtgagatgatattttcagtggattgttctgtctccttcctttcagaaatgctgggccttggagttgggaatcttctctgagtctgaagcatcctgcctgacaggtttgctcacattcacccatgccttccctcagtccctcttatctcgcttagattccatctctcgtgatccagtgagatgaacttgggaagaggctgcactgggcatggtcttgggaagggctcacacccagacatggatggagacggggtgagggtcccatggtgtcagtgctgttggacagcagggattgttcaggggccacatctggacgtactgtcagctctctgtggaccagtattagagcagctgccaatggaagtcatgtattcatgtgcacaaagtatgtggtaaattctagaaaaggtgaccaagatcgagaaatgttttctgcctgattttataatacatttttagttttttgagtgagttactgtgtttctgactccaaaaatcttagtaattagaatggaaagttcatacacagacatgaaagatagaagatgttttattctgtcattattttaagaataggaaatcaacctgaacaatagcaggagattcattaaaccattcttagcacattacgctcatggagactgtggtgttaccgtggagaggcttgtgaaacaggtgttttcattaaacgtttttataatttttattattatgttatgataatattatattttaaatatgcagagtcttgctctgtcacccaggctgaagtgcagtggcatgatcttggctcacgggaacctccaccttccgggttcaagtgattctcctgcctcagcctcccaagtagctgggattataggcgtgcgtcaccacgcccagctaattttgttgtatttttattagcgacgggtatcaccatgttggccaggctggtctcgaactgctgatctcaggtgatctgcccaccgcagtctcccagagtgctgggattacaggtgtgaggcaccatgcccagccccaccaattattattaaatacatatttttatatttaaccatcacatgatgtatccatttgttttgtggtaaaactccaagcaaagctgcagcttagattttttgccataatgcatctcctttccctgtcacgtcctccaccctccttccagcctcactggggagccactactgtcagttctgtgccaggtgtcagagcaagtcccgttcacgtgtatttctacatcgttatgagacttatgagatgatatcgttatgagatataatcgatgagatataatggatttccatactttgactaatctagttttcatatattttcttttgagactgggtctcactgtggtgcccaggctggagcacagtgacgtgatcttagctcactgcaacctccaccctaaggctcaagccatcctcctacctcaggctcccaagtagctggaaccacaggtgcctgccaccatggctagctaatttttttttttttttttttgagatatagtctctgttgcccaggctggagtgcagtggtgggatttcagatcattgcaacctctgcctcctgggatcaagcaattctcctgcatcagcctcccatgtagctgggataacaggcatgtgccgctgtgcccagccagattttagtttctcatctttcactgtgaatgttgtcatctctgaagacatcacccgtactctgtctcatctagatacggaatgtcacttgctgtgtcaataaaagtttctgggccgggcgcggtggatcacgcatgtaattccagcactttgagaggctgagtcaggcagatcacgaggtcaggagtttgagaccaacctggctattacggtgaaaccccgtttctgctaaaaatacaaaaattaactggttgtggtggcatgcacctgtaatttcagctactcaggaggctaaggcaggaaaatcgcttgatcctaggaggtggaggttgcagtgagcgcagacagcaccagtgcactccagcctgggtgacagactgagactccacctcaaaaaaaaaaaattttagtaaaacacaactgggaagacaaaatgcggtgaaaaatcccttactcagatttgttagaacattcactgcatttaaatccatgccttcacctctcttcttctcattttctgtaaagataagaactcctctcataaccatttggttaaaatgtgttttcatttcagggtctattgacattcagggatgtggccatagaattctctcaggaggagtggaaatgcctggaccctgctcagaggactctatacagggacgtgatgctggagaattataggaacctggtctccctgggtgaggataacttccctccagaagtgggaatgtgcccttgtgtatctttgtattttctcttgtttttagatacagtgtcttgctctgtcacccagggtagagtgcaatggtgtgatcatggctcactgcagtcttgaattccttggctcaagtgattgtcccacctcagcctcccccggtagctggtacaggtgcatgccaccatgtttgggcaaattttttagtttgttttctttccagacagggtcttgctgtgttgttgaaattcatcttgatctcctgagctcaagagatcctcctcagtctcccaagtagctgagattacaggtgccaaccaccatacctaattattggcttttatttttaagatttttgcatatgtgtggccgggcttggtggctcacgcctgtaatcccagcactttgggaggccaaggtgggtggatcacgaggtcaggcgatcgagaccagcccggccaacatggtgaaaccccgtctctactaaaaatagaaaaattagccgggtgtggtggcatgggcctgtaatcccagctacttgggaggctgaagcaggaggatcacatgaacctgggaatcggaggttgcagtgagccaagatcaccactgcacatctgcctggtgacagagtgagactccatctcaaaaaaataaataaaataaaatgaaatatttgcatatgtgtgtccttaaggctaatatgagtctatgagtttcttgtagacaacatgtagttggttcctattgattcagccagtctttggtttctgaatgcagagttacttacagtggaagtattactgatggagaagaccttacccttgtgattttgttacatattatctgtgtttcttgtaggttttttttgttcttcatttctcatttactactttttgtgtttaattgcttttttgtgtagacatgctttgactcccttcttttatttacttcttttgtttgtttgtttatgatggagtctcactctgtcgccaaggctacagttcagtggtacgatcttggctcaccgcagccagctccgcctctcgggttcaaatgtttcttgtgccccagtggctcacgcctgtaatcccagcactttgggaggctgaggcaggcaaatcacctgaggtcaggagttcaaaaccagcctgcctaacatggcgaaactccatctctactaaaatacaaaaattagccggacactgtgatgggcgcctgtaatcctgctactcaagtgtctaatgcaggagagtcacttgaacccaggaggtggaggttgcagtgagccgattgcaccactgcactccagcctgggcgatagcacgagactctgtctcaaaaaaaaaaaaaaaaattccataacctgcaaaaactatttctccactagaactctgtatttatgtcagaattatttctgtgtatgttgcactttcatcaacctatatggatactgtgttttcatgcttttttcttctaaataggaaaaaaagttgaattatgaagaaaaggtacacttataacagtttatgtgtccttttatttgcctgttcatttatttatttatttgttgatgagatgaagttttgttcttgtcgcccatgctggagtgcaatggcacaatctcgggtcactccaacctccaactcccaggttcaagcaattctcctgcctcagtgtcatgagtagctgggattacagatgtgtgccaccacgcctggctaattttgtattttaatagacacaggctttctcctttttggttaggcaggtcagaaacccctgccctcaactgatccaccaacctcggcctcctaaactgctggattacaggttgaaccaccgcacccagcctgtctgtctttttatttacctttactggagaactttatatatatctgtgggttggagttactctttagacttctttcatttctttcttttttttaagatggagtctcggtctgtcacccaggctggagtgcggtggtgcgacctcagctaactgcaacctctccctcccaggttcaagtgattctcctgcttcagtctcccaggtagctgggactacaggcacatgccaccacacccggctaattttttttttttttttttttttagaaacggggtttcaccgtgtgaaccaggatggtctcgatctcctgacctcgtgatcctcctgcctcagcctcccaaagtgctgggattacaggtgtgaaccaccatgcctggccagcctcaaagtttttaaaacatgttattgctattagatggcttcaagtattgttaagatttatagtacaggctctaaacttcctttgtttaatcagatttttcagccctcggtgatgttgatgagatgctcctgttcctgtctcagtcatttcactgtcctgtcagaaatagcttagactggccacccgaggtggctcatacctctaatcccaacagtttcggatgccaaggtgggctgatcacttgaaatcaggagtttgagaccagtctggccaacatggtgaaacctcgaatctactaaatacaagaaattggccagttgtggtggctcaagcctgtaatcccagcactttgggaggctgagaggggcagatcacctgatttcaggagttcgaggccagcctggccaacgtggtgaaaccctgtctctaccaaaaatacaaaaattagctgggcatgctggcgcatggctgttatcccaagtactcactaggctgaggcaggagaatcacttgaacctgggaggtggaggttgcagtgagccaacattgccccactacactccagtccaggtgacaaagtaagactcgggctgaggcgggagaatctcttgaggcaggagaatcatgccactacactccaatgtgggtgacagagtgtgactcggtctcaaacacaaacaaaaagagaaatagcttaaactgggaggcttcagacacagaaatttatttctcatgaatttggaaagtgggaaatccaagagcaaggtgccagccaaattggttcctggtgagagcattcttcatggtttagcccagccatcttcctgccgtgtcctgacatggtggaaacaggaacaggcaacgagctctttaatatctctttttatgaaagcacaagtcctattcacgagtagtcaacacccgtgaccaaattgtctcaaaggccccatctgcagaacatccttttggagaataagaactctgaacatggcttttggccaatatgaacattcagaccaggtagcctgcatcatattttttatgtttttattgtgcaatttgatttataaaatgttttctctgatcttagtttaaaatttttcccagtgcacattctgtgttttatattttgtgcatagtgagctagataattaaggtcaacaatgcacaggtgcaatctcggcttactacaacctccacttcctgggttcaaatgattctcctgcctcagccttccaagtagctgagattacaggcacccaccaccacgaccagctaatttttttgtatttttagtagagttgggatttcaccatgttggccaagctactctcgaactcctgacttcatgatccgcctgcctcagcctcccaaagtgctggtattacagaccgtgcccggctgttagtcaattcttattccttataatgctgtgcacttctttgacctcataaatcagatggtagtgatcttaacatgtatttcagtttttatattgtgtgctggttgtaagtagaagtttggcgtttttcttaatggaattgtttagaattttgcaggttgtataaatgtacttattctttgcttcctggttttatggattacaatattttactaattaatttttatgattgtacatgaggcttttcggtatgtggtatgcaatataactgacacagtccactagctaatgtcacacagtgccaccagatgctgtggctcacacctgccatcccaggactttgagaggttgaggcgggtggatcacttgaggtcaaaagtacgaggctggcctggccaacgtgttgaaaccctatttctactaaaaatacaaaaattagccaagcatggtggtgtgtgcctgtaatcccaggtactcaggaggctgaggcaggagaatggcttcaacccaaaaggtggatgttgcagtgagccgagatcaggccattgaactccagccagttgcaacagagtgaaacttcatctcaaaaatataaaaataaaaaaaatgttttaatgtcacaacgtgccttttcttcatggatataggtaattttatgacagttattcagaaaaacattgtattaactttttttttttttgaggtagagtctcactttgtcacccaggctgaagtacagtggtgaaatcttggctcactgcaacctctgccccttgggttcaaacaattcttgtgcctcagcctcccgagtagctgggactagatgtgggccaccacgcctggctacattttgtaatcttttcttgtcttctcagtgctatgactgtttgacaatacagaatttccattgattttggttatccttacatgagcttgttgtggattatttaccaatatagtatatcgtgtggtcctttagcatttatttgtatacagtaaatatgctgtaaatatgaagaatatatacttttcattgatatgacagtgatatgttttttacaaactgttagacactttagggtcacaatggaaaaatattccttactttaggctacacatgtttgtgccctgtcaatgttttgtcacgatcttggaaatagacttccgtaaaaataatttgaagcacatgtaatcgccctttatttgttaaagaatcttatgcttttctgttcctaaactttgagggtcatgtttggaaagtttaaaataactattgttttttgtgtcgtatttacacatttcagcattatttaccatctgtacttaatttgaaagctttcggtgtttatgttttgtagatatctcttccaaatgcacgatgaaggagttcttgtcaacagcgcaaggcaacagagaagtgttccatgcagggacattgcaaatacatgaaagtcatcacaatggagatttttgctaccaggatgttgataaagatattcatgactatgaatttcaatggcaagaagatgaaagaaatggccatgaagcacccatgacaaaaatcaaaaagttgacaggtattacagaacgatatgatcaaagtcatgctagaaacaagcctattaaagatcagcttggatcaagctttcattcgcatctgcctgaaatgcacatatttcagaccgaagagaaaattgataatcaagttgtgaagtctgtccacgatgcttccttggtttcaacagcccaaagaatttcttgtaggcccaaaacccatatatctaataaccatgggaataatttctggaattcttcattactcacacaaaaacaggaagtacacatgagagaaaaatctttccaatgtaatgagagtggcaaagcctttaattacagctcactcttaaggaaacatcagataatccatttagcagacaaatataaatgtgatgtatgtggcaagctctttaatcagaagcgaaacctagcatgccatcgtagatgtcacactggtgagaatccttacaagtgtaatgagtgtggcaagaccttcagtcagacgtcatcccttacatgccatcgtagacttcatactggagagaaaccttacaaatgtgaagaatgtgacaaagctttccatttcaaatcaatacttgaaagacataggataattcatactgaagagaaaccatataagtgtaatgagtgtggcaagacctttaggcagaagtcaatccttacacgccatcatcgacttcatactggagagaaaccttacaagtgtaatgagtgtggcaagacctttagtcacaagtcatcccttacatgccatcatagacttcatactggagagaaaccctacaaatgtaatgagtgtggcaagacctttagtcacaagtcatcccttacatgccatcgtagacttcatactggagagaaaccttacaaatgtgaagaatgtgacaaagcttacagtttcagatcaaattttgaaatacatcggaaaattcatactgaagacaatgcttacaagtgtaatgagtgtggaaagacctttagccggacatcatcccttacatgccatcgtagacgtcatactggagagcaaccttacaaatgtgaagaatgtgacaaagctttccgtttcaaatcaaaccttgaaagacataggagaattcatactggagagaaaccatacaagtgtaatgagtgtggcaagacctttagtcggaagtcatacctcacatgccatcatagacttcatactggagagaaagcttacaagtgtaatgagtgcggcaagacctttagttggaagtcatcccttacctgccatcgtagacttcattctggagagaaaccttacaagtgtaaggagtgtggcaagaccttcaatcagcagttaacccttaaacgccatcgtagacttcatagtggagagaacccttacaaatgtgaagatagtgacaaagcttacagtttcaaatcaaaccttgaaatacatcagaaaattcatactgaagagaatccttacaagtgtaatgagtgtggcaagaccttcagtcggacgtcatcccttacatgccatcgtagacttcataccggagagaaaccttacaaatgtgaagaatgtgacaaagctttccgtgtgaaatcaaaccttgaaggacataggagaattcatactggagagaaaccttacaagtgtaatgagtgtggcaagacctttagtcggaagtcatattttatatgccatcatagacttcatactggagagaaaccttataagtgtaatgagtgtggcaagaactttagtcagaagtcatcccttatatgccaccatagacttcatactggagagaaaccttacaagtgtaatgagtgtggcaagacctttagtcagaagtcaaaccttacatgccatcgtagacttcatactggagaaaaacaagtgtaatgaatgtggtgaggtttttaatcaacaagcacaccttgcaggtcatcatagaattcatactggggagaaaccttagaaatgtgaagcatgtgataaagtttacagtggcaaatcaagcctcagaagacaggagaattcatactggagagaaagcttataaatgtgaagaatgtcacaaagtttacagtcgcacatcaaaccgtgaaagacaggagaattcatactggagagaaaccataaaaatgtaagagtttgtgacaaggcttttgggcatgattcgcacctggcacaacatgctagaattcacactggagagaaaccttaccagtgtaatgagtgtggcaaagcctttagtaggcagtcaacacttgtttaccgtcaggcaatccatggtgtagggaaactttactaaggtaatgattgtcacaaagtcttcagtaatgctacaaccattgtgaatcactggagaatccataaggaagagagatcatactagggtaataaatgtggcagatttttcagacattgttcataccttgcagttcatcggtgaactcaacgctggagagaaaccttacaaatgtcatgactgtggcaaggtcttcagtcaagcttcatcctatgcaaaacataggagaattcatacaggagagaaacctcacatgtgtgatgatagtggcaaagccttcacttcacacctcatgagacatcagagaatgcatactggacagaaatcttacaaatgtcatcaatgtgccaaggtcttcagtctgagttcactccttgcagaatatgagaaaattcattttggaggtagttggtccatatgcaatgagtagagcaaaccatcaagcattaattgacattagggtcaattcagcattgacttgagtttgtattgacttaacattgagttcaagcattaattgacattagtgtttatgttaagaggattgggccaggcacatcagcttacacctgtaatctgagcgctttgggaggccaaggtgggtagatcacttgaggtcaggagtttgagatcagcctggccaacagacgtgagccattttcccagcctgttttttgtttctttaaaaaaactgatagggatttttatggatatcatgttgaatctaaatcacattgggttattatataatcatttcacaatattaatttttccaagctatcaatatgggttgtagctcaatgtttttaatcattttgatcaatgtttgtagatttcaaggtacaaacttctgacctttgtacgtttatttctaagtatttctttaagttctccagcaaatggaagtgttttaaaattttcttttaaaattgtttattgttaaagtatggaaattcaactaatttttggtgctgatactgtattgtgcaaatccactgactatgttacttagttccagtagtattttggttggctctttgtgattttctacacagaagattatgtcatctacaaacaaatataattttacttcttactttctgatttggatgagttttatttcctctgctatttcattgctctggctgggacagccagtattgattgaatagaaggggtgagagcattcttgcatcatgtgagagcctccaggaaaggcattacattttccctgcttgactgtttactcattggtcatttcatggacggtctttctattgttgaggtaaatttccttttctgtctattttgtttaggatttctatgatgactggattttgaattttgtgaaatgctttttctctattaagatgatgtggttttcatcttttgttctgttcaagtggtatatcacattgatttgcttgaatatgttgaaccatccttgcatcccagaaataagtggcacttgaatatctacatttttttaatgtcctcttgaatacagttttctagtacaatggatcttgaagaagttcatggaaaaatacctattatgagaaaatttgcatgaattttagtttttgcaacaaaacactggtacaagtctgttatgtctgaacaggctgtagtttaaggcactcagaaggataagacatgagtttgaaaagagactctatcaaagcaatataaattctgctaaaattgaaacaagaagaaacatcaaatttacgatgagatcagatgcagtgtctcaggtctataatcccagcactttcagaggccatgacaggtgggtcacatgagcccaggtattcaagacgagcctgggcaacatggtgaaacccccttgtctacaaaaaatacaaaaattagctgggcatggtggcatctgactgcagggccagctactgtggagtctgtggtggaggatggcttgagcctgggaggtcgaggctgcagtgagctgtggtcatgccactgcactccagcgtgggtgatggagtgagatactgtctcaataaaagaataattatgggccgggcggcgtggctcaatcctgtaatcccagcactttgggaggctgaggcgggtggatcatgaggtcaggagattgagaccatcctggctaacacggtgaaatcccgtctctactaaaaatacaaaaaaaaaaaaaaattagccgggcatgctggagggtgcctgtagtcccagctactcagggaggctgaggcaggagaacggcatgaacccgggaggcagaacttgcagtgagccgagatcatgccactgcactccagcctgggggacagagtgagactccgtctcaaaaaaacaacaacagcaacaacaaaattatggtaaagtttgggaagaggaataatggaatcattgatactttatgaaaaggttatggagatgatgcccaaaagaaataaaccatttgtaaatggataactcatttcgaattgggacaagacagtgttgaaggtgatgctaggagcggcaggcagatcacatcagttttttgttttgtttgtttgtttgctttgaggcagtgtctcgatctgttgcccaaaagctacgtagaggccaggcgcaatggctcatgactgtaatcccagcactttgggaggtggagacaggcaaatcaccttaggtcgggagttcaagaccagcctgaccaatatggcgataccctgtctctactaaaaatacaaaatgagccaggtgtggtggcgcatgcctgtaatcccagctactcgggaggctgagacagcgaaggggacctgcccctccacatctgtgggtattcctcatcagatgagagactgagaaaagaaataagacacagagacaaagtataaagaaagaacagtgggcccaggagactggcgctcaacatgcgaggacccgcactggcgctggtctgagttcccttagtatttattgatcactatttttactatcttggcgaggggagtgcggcagggcaacggggtgacggtagggagaaggtcagcagggaaacaagtgagcaaaggaatctgtatcatgaataagttcaaggaaaggtactgtggatgtgcacgtaggctagatttatgtttcactttacacaaacatctcagtgtagcaaagagtcacagagcagtattgctgccagcatatcgcctccagccatagggcagttttctcctatctcagaatagaacgaatggtcggctttacactgagacattccattcccagggatgagcaggagacagaagtcttcctcttatctcaactgcaaagaggcctccctctttcactactcctcctcagcacagaccctttacaggtgtcaggctgggggatggtaaggcctttcctttcccatgaggccatatctcaggctgtctcagttgggggaaacttggacaatacccaggctttctagggcagaggtccctgcggctttccgcagtgcattgtgtccctggttaacagagaatggagaacagcgataacttttaccaagcatactgcctgcaaacatattaacaaggcacaccctgcacagccctaaatccattaaaccttgattcaatacaacacatgtttctgtgagcacagggttgaggctatagttacagattaacagcatctcgaagcagaacaatttttcttagtacagatcaaagtggagtttcttatgtcttccttttctgcatagacacagtaacaatctgatctctctctcttttccccacagaaaggagaatcacttgaacccaggaggaggaggttgtggtgagccgagattgcgccattgccctccagcctgggcaataacagtgaaaatctgtctcaaaaagaaaagaaaagaaaagaaaaaaagatatatactcccctaagaaaagaaaaaaagctatatactcccctcacaaactggggacctcaagatctccaccctaaaatagttattttgaatttccccctggcaatgtaaaccgagagcttatctgcacaggtgtgggacagaaccaatccctctgcacacctgagacaaatgcctatctgattgcttcccctgccctattgtttacataaaaacgcagggtcactgaggcagtcgaaggcataagtgactattcctcctcccgctctcacatataaattgtgtatttagtgaaaggttgatcaaagactcaaagaatgtgatcatttgttatctacctgtgacccggaagccccccaattccagttattccacctttccagactgaaccaatgcatatcttacatgtattgattgatgtattatgtctctgcaaaatgtgtaaaaccaaactgcagcctgaacaccttgggcacacattgtcaggacctcctgaggctgtgtcacgggggcatttttaaccttggcaaaatagatttctaaattgactgagacctagtagatacttttagttcacaagctcatgaacgcagaagaaattgagagaataagaaaaaagctaggtgtcatggaaagcacgaaatcagttccaaaatctgaactccttcatatttattcaacatagggaaatgctcttcaactttgtgtgattagattccatttgcgaatgatatatatttctagtatttgattaaaataacccattctatgtaattttagccaacttaaactgcaaataataaatgatcaattatatacatacataaaacttcctaatatttcacttagtattgctattactatgttcttggggcagaagctcagtctgtcagatacattacgagagactggtgtctccataattgtgcttaggactatgttgcatgaatggataaactgttaagcaggaacctaggagagctagggtgacaaagttcaagtccattaaaactagcaagacatattccttacagctcatgcacgagtcaccgtcataagatgtttatggttaaggaaagcagcttattgatacctgcaaggacaaatttctacagaaacacaatgtccagatgacccaatatcccatgacaatgtatgcttttaagatagcaggctggtctcggactcctgacctccggtgatccacctgcctcggccttccaaagcgctgtcaatacaggcgtaagccattgcgcctggccaaggatagctttaaatcaacaaagtaataagttttgttacagtgtcagcccacccgcaggtagacataccttagcttttacgtaggctttggccgggcgcggtggctcacgcctgtaatcccagcactttgggaggccgaggcaggtggatcacgaggtcaggagatcgagacaatcctggctaacacgatgaaaccccgtctctactaaaaatacaaaaaattagccgggcgtagtggcgggcgcctgtagtcccagctacttgggaggcagaggcaggagaatggcgtgaacccgggaggcggagcttgcagtgagcccagatcgcgccactgcactccagcctgggcaacagagcgagactccatctcaaaaaaaaaaaaaaaaaaaaaaagcttttacgtaggcctctatgtaagaaaaacttcaggaggaggcgttccccctgctttctgaggacgccctactgcgtaactggtagctttcaataaactctctcgcctcactacactcggaccctcgccttgaattttttactgcgcaagatccaagaactctcacatggggtgtggactgtgacaccattttaggcaacaaaacgactgaacgttatacaaaaacagacaattaatccaattctcacaaaagcaggaatttggtagtcctcatccagcatgccaagcaaagatccacactgtggagtcagcgctcacgagaacaaaggggctgacagctgggaaacatgggtggatgaagggtgaggcgctcagcagccgccaactgggattattggaaagggcaatagggtattgaaaggcggaggacacggtctaaaacgatacaaaagctgcagagccactgggcctgcgagcttcccatggggaagccgggactccctgacaactgcacaaactcgcgtggggatttcaacatcccgaagcacccagattccttctgggcgggttctggacagagagcggggacggaacgggaggggtaaaggtcgccgagggggccgggccagaacaggtgctgggtcggggagagagggtggaggcagctttggaaaccgggcctggttagagggtgggggtggggcctggaatgggagtgggcggggcaagagggaggaggctgcctgggggccgggctggacagcaggaaaaggcgggacccgagggttagcgtcatcttgggggtggggtctggaaggggttttttgttctgaagggcggggcctggagggggcgggtccggattcttttctcagctgggccgtggatgtcgcctgctctcatcctcttgccctccaggactgggtcctccgggttctgattggtggattgtttctgatgtgccatgatattacccctaatatcacagggatgcttcctgcccgttgaagttactatttcgaacaatcgaaggtaaaacaacatattgtagtgggccacctgtactgaacgttgaatcgtttttcctcttaagttgaaaatagtttcaatgcaaagagcttttttggagaaggtagagtcgcgcgtcctgcaggcggggcaagctcccctcagtctggggcagggcggtggagagggtcagggacctcggtaaaggggtggagtggggcgctggttgcagcgggcacagacaattagaacggcttattaaactaagcaaggtcctgggttgggttgtttgagtggataatggaaactgaagggtgacaagcagaactgcctattatacacaggaggtgaaggacaatttcatatttcatggaaataaagtcagggcccggagcggtggttcacacttgtaatcccagcactttgagtggccgaagtgagaggatcgcttgagcccaggagtttgagatcagcctgggcaacatgatgagacgtcgtctctaataaaaatataaaaaaatcagccaagtgtggtggtgcgcgcctgtggtcccagctgctggagcgctgaggtgggaggatcgcttgagccagggagttggaggctgcagtgagccctgatctcaccaccacactctagcctgggtgtcagagctagaccctgtctcaaacaaacaagcaaataaatgagaggtgtaattcctcctgtgaaaataaagagatttactttcctttcgtctcttttcttaggagacttatttagaaaatttgtaaatggattttgtctgtcttctgaggttttttgttgttttgtttttgttgtttgttttttagatggagttttgcttttgttgcttaggctagagtgcaattgcacgatcccagttcaccgcagccttcaacttccgggtacaagcccggtttcgaactcctgacctcaagtgattcgccatcttggcctctgaaagtgctgggattacaggtgtgaaccaccacacctggtctgaagtggtattttttagaaactaactaaaccttttttcagcttgatgacccagggatgtatttctgaaggacttgggagctctctttgaaaggcaaaatacaagggagacagtacctgtatctcagtaggaaattaaataattcatacatcaaataattccaatttaaagctatgacctttaaataattatgagcctttgaagagagaggccatttctcttactgtctcctgtctctgaagtaaaagctgaaaaacaacaggaatgaagtcagtggcaagaccagctggtgccactgatgaccaggcctgaggttaaaatattaacccccaactctaaccacatgtgctctcaatctatcatgaccctttcacgtggaaccccttacagttgtaagcccttaaaaggaccaggaactccttcttgggggagctcggttcttgagatgccagtcagccgatgctcccggccaaataaagcaacttccttctttaaccctgtgtgtgagggcttttgtctgtggctcgtcctgctacaccttgagagaaatgtgctcattcagcttgagtccagtggaatgcaggcgtaacttctacgagttttccttgccacgtgtggtggcccacacctgtaatctcaccactttgggaggtcgaggtggacagatcacttgaggtcaagagtttgaaactagcatggccaacatggtgaaaccacctctctactaaaaatacaaaacaaaaggccaggcgtggtggctcacacctgtaatcccagaaaattggaaggcttgggcgggtggatcacaaggtcaggagtttgagaccagcctgccctacatggtgaaaccccatctctactaaaaatacaaaagttagctgggctcctagctactcgagagcctgagccaggagaatcgcttgaacccgggaggcagaggttgcagtaagcagctgagatcgtgtcattgctctccagcttaggcaacagagcgagactctgtctcaaacaaaaaaaaacaatggtggcatgcacctgtaatcccagctacttgggaggctgaggcaagagaactgcttgaatctgagaggtagaggttgcagtgagccgaggtcgccccactgcactccagcctatgcaagtcttcctcttatttacaggaaaagttttcatgtaaataattagaaagactaagcaaccccagagataagacctcctgagatcattgtccctttttatggagtgataaagtaaccttccttgaagtgtatcactctgtcaccaatcaacttgctgcaacctatgcactggtcttgaatggaaaatgtgattgtcctaaagcttctgtctttccctgtgtgtgaaacctaaacgtctctactatggaacgctgatcccattcatttggagttgatgtttgccagtggctatcctcatgctttgtgttcagataaactctatatttaatcataaattctaaattttattatttactgctgacatcagtttctgtcggattttaggagcctcactacagagggcacctgtcgccatgttgtaaaactcacacttgtcaaaaaaacatgggttagggtttcttcccctcctcggcatgaagctacttagctgacacagatggttacctccattaccaagtagagccaggatgaactatgtgtgaccaagggtgttgtcaagtcctcttccctgaggactgattagtgtttatcttgaaaacatgtacttaatgggttgtatagaacagtgaagtttctttctctcttttcaacctcttagctgtttgtctatttcgcatcataatctggcctaaggcttatttattaatgaaatggttttaatttctttctctattgtcgtcgtggagatgatttctcattggggggaagactttttgtttgttttcaattatgttttctcaacaattggaaagtgaagtaaaaagtatttgttgggccaggtgcagtggctcacgcctgtaatgccagcactttgggaggccgaggcaggcggatcacttgaagtcaagagtttgagaccagcctggccaacatggtgaaacccgtctacaaaaatacaaaaattagccaggcatggtggcacgcgaatgtaatggcaggtactccggaggctgaggcaggggaatcgcttgaacccaagagggaagaggctgcagtgaaccgagatcccgttactgccctctagcctgggcgacagagaaatactctgtctcaaaagaaataagtaaataaataaagtaataaatctcttccacaaacgtgctgagacaactaactgaatatccagatggaaaagaatactgttggatccctatctcacacaatcaaaattgtattttaaaacattaaaaaaaaaaaaggaaaaaaagagacgaggaaggaagcgctgcgggagggggtgttactttgtcgctcaggctggcctggacccccaggctcagcgatcctcccgccgctgcttcctgagtagctgggacctcaggctcctgcccccgcgcgcgcatccctcccaccccggcgccccatccagcaggtggtcacctcactcctccctggcctgagcactccgtcccgcatccatggcggtggctttagggaaatctctgaagttgagcacggggtggacttgccctcctgagtgaatggagaatagaaagggggaggatttctattttgttttgtgggccgtcagcatgaaatcgtaccttccgcccaggcagggctttgcatttcacattctagtttgcatccccgttccagacaattccagggcttttgaatagtgcctcaaccttactggccggtctcgactccaaaaccctaaaacaggcgctggagcgagggtgacggactcacaggtcccaccccggccccgccctctgcgccttccaaagggcaaagtctctccgcctctcgccccgcccctgcttcgtcaggccccgcccacctcccaggtcccgcccaggcctggcttctgtcctgcgcgcagattcgcgaaaacccggaagcggatcgcgtggagtgacggtcccacggcagcgcgtgagtttggctctgtgttgtattaggtctgcacttcccaggtccctggcgcttctgtacctggggcgtggggtccccacaaacctggaaattctcagccgtcttccttcacccagagcaaattgagacgaccccgtgagagtccgggggtcgcttccttttgtgtttaaggtcgccctgaggctggtcccgtcccgggtctttctgctatagggcaatgtatacactttctatcgcgcatttttcctgctctaaacctttctctgactcctcccaccccgcgctttttgaagtcctcacccaaggggtggattctcgcccacttcggccggtggagcgcagaaccgcggccccagtcccgggaaggccgcgtcctctgtctggtcccgggatcctgcagaccccacccttgtcttaaggcgccctcgcgcccccccccccccacctccctcctcctgccgggccctgctgcttcctaggtctcccctccgcagtcacggcttcccctgagcccacgttggggaggtgcccggggcttgtcctgttgaaggaggccagcccttccacacctgtgggtatttctcgtcaggtgggaagagagactgagaaaagaaataagacacaaagacaaagtatagagaaaggacagtgggcccaggggaccggcgctcagcatacggaggaccggcaccagtgccagcctctgagttccctcagtatttattgatcattatttttactgtcctagtgaggggagtgtagcagggcaacaggtggggagaggtcagcaagaaaacatgtgagcaaaggaatctatatcatgaataagttcaaggaaaggtactgtgcccagatgtgcacgtaggctagatttatgtttctcttcacccaaacatctcagtgtagcaaagagtcacagagcagtattgctgccagcatatctcgcctccagccacagggcggttttctcctatctcagaatagaacgaatggaaatggtcagctttacacctagacattccattcccagggaccagcaggagacagaagtcttcctcttatctcaactgcaaagaggccttcctctttcactactcctcctcagcacagactctttacgggtgtccggctgggggatgtaaggtctttcctttcccacgaggccatatctcaggctgtctcagtggggggaaacttggacaatacccaggctttctagggcagaggtccctgcggctttccgcagtgcattgtgtccctggttaactgagaatggagaatggcgatgacttttaccaagcatactgcctgcaaacatattgttaacaaggcacaccctgcacagccctaaatccattaaaccttgattcaatacagcacatgtttctgtgagcacagggttggggctaaagttacggattaacagcatctcaaagcagaaacaatttttcttagtacagatcaaaatgaagtttcttatgtcttccttttctgcatccacaaagtaacagtctgatttctctttcttttccccatatcctgtgacatggggtgttcttccctgcccagctccagccccttgaaaatgcgctcccctggtatgtagccatcttactccaaaccgtcatgtgattctgtgggctaaagggatcaggagacacacgcagtagaaaacctgagaaagaaaagaatgagaaagactcataacagatggcaaagtagagaatgggtgagggatttgccaagagacaacgaaagtgaaaaaaatatatataagaaagcaggaggagaaaagcaactggagacatgcagagaaaagctagatgtacagagagatgaaggacagcaaggtagggagaggggcagcaaagagggaggctcatcagggtgagggagaggaggagggatttggagccagggcagacagagcagagtggtgctggtggcaagaacagagggagaagcacagcagggaggacacctggggatctaggctgccagagagtggggacagggggtataacagggaagagagaatttaacggggagagcagaggaggcgcagagatggtgttgcgggaaactgaggactagagagactgctatgggggagacagaaggatgtttacttaaggtacgcaccggctcagtggatttacatctaaaaagctgagcatttcaacaaagagtggggtttttataagcaggcttacagaagcaaaataaaagcagttaatcatgtaatgattggtcacataatctatagcatagcataacttgtggccttgcatagctggtggtcttgcagctgcattgaaagaaaagcaagaacagctaaatacatttgttttctttctttctttctttctttttcttttcttttctttctttctttctttcactcttgttctaaaggggaggaggtgtctggagcccattcctttggcttcgacttcgcaaacagcgttatgttataactgttctctaagtgagcttgctaggcagaggaaaacttgttcttctctttttaacccttgccttgcctgttacttttcttggagtgaatgaatgcatattttttttttaatttctgcctgagttttctccctttgctttttataaacaagattttaatagaaagcatcactattacttgattattcatgaaaaagcaggttttcttctttaggcacaggctgatatttatatggagctattagctgagtggtagtctgcctagtgacaattgcttctatagttgattgaatgttccttaacaaggagaggtaagaggtaagggagtattaaaccaattcttagtatttctagaaccactcctgttaaggttttgaatcgactgaaggaggaaaaccagccgctaaagagggactcaggagtctactttgtctaagtctggactggaacatgggataatttttttattcttgcagttatttctataacagccttcctattgtcattgatttctaggcagcaattagttagattaaactttctacatactcctccttcctgggctaggaggtagtcgaaagctaatctattttggtagatggcatttctcatttttgtggcttgctgggccagtaagtctaatgcatttgctgtttcattagtgatgatttcaagtactgcttgcaactttatgatgcggttaagcatgtaaattggggtgcggtacctttatgacttattttgtgcccaggtagctggcctagagtactgaattagtctttcagggggccaatctgtgtctttctagtcttctatttttatgtcttttcttatgtctatatctcttttgtttttttctttaattttattgtagacaggataccttcaagtttctccctgttgcagtgggagtgagaagaaacatggtctaattgtttcaagtacacaagcccttgtcctttttcctggcaactgtcggtaggcccttggtgcacagatctaatagagaccagagggtgcttgccaggtatttggagcttcaagctgatactatgtgtggtttagagaagagaaacaggagaatgggtttggatgaggtgatctggagtcatctttgccttgccacaaagttttctttagtgttttattataatattcctgtcttaaacaagttaattcttctagggagtctgtaaaagcttttccttagtgagcaacacagtatctcctgataatggaagtttttaagagctaggggcttaaggctgggtgcggtggctcacacctgtaatcccagcactttgggaggctgatgcgggtggatcacaaggtcaggagatcaagaccatcctggctaacacggtgaaaccccgtctgtactaaaaatacaaaaagcaattagccagtcttggtggcgggcacctgtagtcccagctactcgggaggctgaggcaggagaatggcgtgaacttgggaggcggagcttgcagtgagccgagatcacgccactgcactccagcctgcgtgacagagtgagactgtctcaaaaaaaaaaaaaaaaagtgctaggtgcatcggttcgggggaagagtcagttagagttaaattatcttgtgacattaactcttttgcttcttaaggccattggtctcctatgttagtccttctacaaacataacatgagaaaatgcttaagctgctagcaatgttttcagctagccgagcaaacaggtttttagctaaaggatgatgctctcgtaacttctagtctgcatgcttatggaatgatttaaaaactcggaattgttgctggtccgggttcctttttgataacatataggtaggtttctgggtaggtgtgtgtggagacatgtatggggtaacctgcagtccacacgggtaggtctggctttagaatggtgaaatttactggatgacaggtttttgtttcacagtctggttttactggcatttcgataagcataattggcctttgttgtgtgctggggtgccacgatatgcaatactgagaatctttttctgggtcccaggggacaaggtggcatgcatacatatttgtagtcatttctatagtatctttatacaggtaggttaccacagacggatgagtctaggtctgctgctggacaagcatcaaaatacagagaaataggccatcggtaaaagggagggaccttggtttggtttaagagggaactttcttttgaccttgcatgtattttaaactattcaccaggtgaaaactttgtgttataacatacataaggttggttatttcctgggtcacaaattgagtagatggtctgattataagtacaagtctttcttttttttttttttttttgagatggagtttcactcttgttgcccaggctggagtgcaatgacatgatcatggctcaccacaacctccaccttctgggttcaagcaattctcctgccccatcctcctgaatagctgtgattacaggcatgtaccaccatgcctggttaattttgtatttttattcaagacggggttgttccatgttggtgtggctggtctcgaactcccgacctcaggtgatccacctgcctcggcctcccagagtgctggaattacaggcatgagtgaccacacctggcctttataagtacaagttcttaagcgagtccttgtacactcataataagtatggtgcagtagagtcttagttatcctgttccctgaccaggtaggtagtatgtgtacagtggggacacatttctatagttgctttttctaccatggttaaggagggtagcaacagcaaaacagtgtacagcatgttcatatccagcaaggacagaagagggccttgcctggcagaggaggttgagcacaacgacagaacaataataaaacagttagtattacaaggaaaactactagtcttaagatttctaaccacatttacttgcttgatgagtcctcaagcttcagctgtgcgtagactagtcagcttctggtgtgtgactagagcagggcttgtcccctccagcttcagctgtgcataggctagtcagcttccggtgtgtgactagagctgggcttgtcgtcccctccagcttcagctgtgcatagactggtcagcctccagagtgaccagagcagggctgtcgtcctcagcagcagcttggtctcatctcaggatcagctgagttggatggtctgggtcttgctggctggtccacttgccctgagctgccagtttcagctgactgtggtggatctacggcatgattcctgcaaatttaatagcagtgggagtggacaagattacaatatagggcccattctatatgggtcttagagaagttggattctactttttaacctaaacagagtctccaggtttaagcggtgtactggatctgtcagacttatcggcattctttctcatattcagttatgggcttcttgcatggctattattaaagcctgcatttgttttcttaaagttaattcctctagttcttggagatcacttttaatttgacttatgattggagaggccgactgaacgaactctcataaggtgaatacctagtttatttggtgggggtgcacctgactcagaggacaaccatatgaaagacctgatcttatctcaggtgagtttcttggcagtatttcttcagtagctgcttaacgtctggttcatgtattttacttttcttgaactttccggccaataggctatgtgtaacttctattttatttttagcagtcttgttaaatcttgcactatttcagctgcaaatgctggcccattgtctgactttagagatagaggcagtccaaacctgggaagaagtcttcagtcacttctcatgctttttctgtcctggtggggaaagctttaacctatcttgaaaaaggtacaaataagcactagcatataccgacatcctctgtcggatgcacggagcagttcggtaaagtttataaccaagttttcacaaggcatggctcctgcttcttgaattcttgggggccaagtgggcccccataacggttattctgagcacaggttaaacattgtttacaaatggctcaaatgacagcagagagccacagcacatagaaatggcactttcgtggccgggcgcggtggctcatgcctgtaatcctaccactttgggaggccaaggtgggcagatcatgaggtccggagttcaagaccagtatgagcaacatggtgacgtccagtctctactgaaaaaacaaaagaagtagccagtcatgatggcaggtgcctgtaataccagctactggggaggctgaggcagaagaaacacttgaacccgggaagcagaggttgcagtgagccaagattgcaccactgcactccagcctgggtgacagagcgagactcaatctcaaaaaaaaaaccagaaatggcactttcataacgttgctaatgctgtttttcttatatgagtttcttgatgagtttgcttcacaaacttaggagctaacatctttggaatggctagtctcctatcaaagaacttctactaccttcttttaatatattttttatcttcttgggcaaaccaggatctttgatttggagtataacttgggttgtcttggagaggaggttctgggaggagaggcatagctaaggcttcctctttaaaatgcagcgtgatcattgctgcctgctttgcctctctgcctttctgtttcctgtggcttctggcatccttgccatttggtgccctctgcagtgcattatagctactttctctggagcctatactgcctctaagagctgtagaatctcttctttgtactttatttcttgcctctagctgataaaagtcctctctctttatatatagttccatgtacatgcaaggtagtaaaagcatacttagaattagtgtaaatactgacttctcttttgctagcaacagtgctcttgtcagggctattaattctgccttttgagctgatgttccggtaggcagaggctgagcctctactactgagtctgatgttaccactgcatacccggcatgtccaaactcttctagcacagaactacttccacctgtgaagtacttgacatctgggtctctgaggggtctgtctgtaagatctttctcattggggaatacctcgtctactgttttgacacagttatggagaggagctgcctgttcgactgggagcagaatagccgggttagggtgtttactgttctaaaattgtgtaagggttttcacatagaagcccttggtactgagtcatcctcaggtttgataactaatggtgccttctttgatccatcaaagttatgactcagtgtggcacccagacggttagttgctgtcctagagttaatttgctagcttcctgtgttaacaagatggtggcagctaatgccttaaggcaaagaggccatcttaacaccacggagtctggttgtttggataaatgtgccactgggcgatgccacgatcctataagttgagtcagagcccctatagtcattgtttttttgttcatgaacatatagaaagacttagttatgtctcatagtcttaaggctgggacctgagttaaagcttccttgacctgcttgaagtctatttcttgattaggttttcaaaggaggggctccttttctcctctttttgtggcttcctattaacgacttagccatcagtgaacaatttggaatccggaatcttgctgcctctaaaaattcctatttgacgttgggtggccggggttggaagggcacaaatggcttgcttccactcatagccaagccagtgttccttgtggctcactatgacacctagatatatggaacctcttcaaggcaaatttgggcttgcttttttgatattttgtaacttattttctataggaaatggaagagatcctgggttccccgataacagtcctcttagattggggccggcaaaagaagctcatctgcatactgcaacaaggtgcagttgctatttggcagggtataagccatgaggtctgaagccaatgtttctctaaagattgtgggagagaaccgggcatggtggctcgcgcctgtaatcccggcacttcaggtggttggggtggctggatcacgaggtcaggagtccaagaccagaccggccaagatggtgaaacccggtctctactaaaaatacaaaaactggccacatgcggtggctggcacctgtaatcctagctactctggaggctaaggcaggagaattgcttgaacccggggggcagaggttgcagtgagctgagatggcaccactgcactccagcctgggcaacagagcaagactccatctcaaaaaaaaaaaaaaagattgtgggagagtttttttgtttgtttgagacggagtctcactctgtcgccgacgcttaagtgcagtggtgcgatcttggctcactgcaagctccgcctcctcccgcctcctgggttcacaccattctcctgcctcagccttctgagtagctgggactacaggggcccgccaccacgcctggctaatttttgtattttaagtagagacggggtttcaccttgttaaccaggatggtctcgatctcctgacctcgtgatccacccgccttggcctcccaaagtgctgggattacaggcataagccaccgcgcctggctgtgggagagtttttaaacctttgtgggagtctagtccaggtgaactgtgacgcttcattgtcttatgaaatgcaaagataggctgactaactggtgccagacagatataaaagaaagcatcctttaagtttaagactgtaaactaggtagcacttgctggagtcctatcacagtgtacgggttgggtaccactggatggatagttaccgtggcctggtttacaacatgcaaatcttgcaccagcctatattcattagaccctggccctggcaatggcttctgaactgtcaaaagtggagtgttctaaggcgactagcattggactaaaatcttatgtttatagagcctttctgaacgcttgcagatgccctgtatggatttttggggaactgggtactgacgaacctgaaacaggagttgctcctggttttgattctgctactactggcgcatgatttacagctaacccacgtgggttgtcctcagcctgtactccaggaatgtctttaactaactggaataataatttttcttctacttgagtgtgaggttgcattggtgcctgaaaaaggggttgggcacagtggctcactcctgtaatcccaccatttttggagcctggggcaaggggattgcttgagtccaggtatatgagaccagcctgggcaacatagtaagacccccatctctgccaaaataaataaataaaattaaccagatgtgatggtgcacacctgtactcccagctactctggaggccgaggcaggaggatcacttgatcccaggaggtccaggctgcagtgagccgagatcatgccactgccctccagcctggtcaacagagtgagaccctgtctcaaaagaataaaaggggtgggggactttgtgttcagatgagtgggtgagttcactgggtatgattacttgtgacatgttgacttctgtgtatataatctaataacttaaaatttgtttaaattatacagatgagattgagaacttaaaaattcctatctataaggcatgtacattgtataaatcttggcatagaggtcagcttccacttggaatccctattcagccagagagcagtgacttattcagttgtgaatcactctattcccttttcgcagggctggggtaggaagtagggcaatgaagtgggaaaaaaatgactttctgttattacataatacttttaattaaattaattaataattaatattttgggacagggcctggctctatcacccaggatggagtgcagcatgatctcttctaactgcagcctcgacctcctgggcttaagcgatcctcctacctcagcttcctgtgtagctgggaccacaggcgtgagccaccaagtcggacaagtattgtattttttttttgtagaaacgggtttcgctatgtttcccaggctggtctcaaaatcctgagctcaaaggatctttctgccttggccttccgaaatactgggattacagggatgagccaccgcacctagcctacatagtactttttaaaggggacatcaaaacgtggtggctcctgccagtaagcccagcactttgggagatggaggtgagtgggtcacctaaggtgaggagttcaagaccagcctggccaacatggtgaaacctggtctctactaaaaatacaaaagttaggcaggcgtggtggtgtgcacctgtagtcacagttactgggaaggccaaggcacaagaatcgcttaaacctgggaggtagaggttgcaatgagccgaaattgtgccagtgcactgcagtctgggtggcagagcgagtctccatctcacaaaaacaagcaagcaaacaaaaaataaaataaaaaacaaaagggacatcaaaagtacatttgttcttatgtgtaatagatttactttattttctttgtttcctcttcattgctttttttttttttcagtttgagataaattgtaggtttttgttttttgttttttgtgtttttttggcagaatcttatgcagtgacccaggctggagtgtagtggcatgatgtcagttcactgcaacctctgcctcctgggttcaagtgattcttttgcctcaacctcccgagtacgtgggactacaggcccacgccaccacaccaggccaatttttgtacttttagcagatatggggtttcaccatgttggccaggctggccttgaactcctgacctcaggtgatccacttgcttcggccccccaaagtgctgggattacaggtgtgagcaaccacgcccagctgagataaatcttagttttcaaaatttctcttttaatacataatcatggagaggaggctgcaatgccgaatggaggaggcaggaaccggagtgtgagcagtagctgggtgggcaccatggctgggatcaccaccatcgaggcagtgaagcgcaagatccaggttctgcagctgcaggcagatgatgaggagtgagctgagcacctccagtgagaagctgagagagaaaggtgggcccgggaacaggctgaggctgaagtggcctccgtgaacggtaggatccagctggttgaagaggagctggactgtgctcaggagcgcctggccactgccctgcaaaagctggaagaagcgggaaaagctgctgatgagagtgagagagatacaaaggttattgaaatctgggccttaaaagatgaagaagatggaactccaggaaatccaactcaaagaagctaagcacattgcagatgaggcagatgggaagtatgaagaggtggctcgtaagttggtgatcattgaaagagacatggaatgcacagaagaatgagctgagctggcagagtcccgttgctgagagatggatgagcagatcagactgatggaccagaacctgaagtgtctgagtgcagctgaagaaaagtaccctcaaaaagaagacaaatgtgaggaagagatgaagattcttactgataatctcgaggaggcagagacccatgctgagttggctgagagatcagtagccaagctggaaaagacaattgatgacttggaagataaactgaaatgcaccaaagaggaacacctctgtacacaaaggatgctggaccagactctgcttgacctgaatgagatgtagaatgccccagtcccaccctgctgctgctccttcctctgaccctgactccgcctgaggccagcctgcccgaagctgacctttacctgagggctgatcttcaattggaaggctgctttctcctctcaccaccccctcctcccctgcctctttttcaccaaactgtctctgcctcttcctggagattccagctgggctagaggctgagaacctttgcaaacaacatttaagggaatgtgagcccaatgcatgtctttaaaaagcatgttgtgatgtaaaaaaaaaaaaaaaaacataattacttctggaagatgcctttgtcacatcctataatcagctcacatcattttttttctgtacatttcccagttatttacctgttgaccccagaatttgttagatttttgaaagacaatttctaaatagtttctgtttgaaactagttgcatctggttcagatcaaggtctgcatgctttctagtctttattatttattgaaaacctttagtaccgaatacagaagtttgattatttcagtgcctacctggtaaagatgtcagtgaccttttaccttaacatcaaaatgtagtttaaccagttagtgtatttttcagttttctttccttatgt[450 bp omitted]tgggagtgctagaagcaaggaagcagcaagtctgggcacattccagaggccacgaggggttttaggccctggaccctggcatgttccaagactctttttatattatgtcagactagcaagccctgcctcagcttttccccaacatggaatgctattctaaaagcacccatgtattctttttttttttttttttttgagatggagtttcactcttgttgctcaggctagagtgcaatggtgtgatctaggctcactacaacctctgcctcctgggttcaagtgattctcctgcctcagcctcccaagttgctgggacaacaggcacccagccaccatgcccagctaaatttttggatttttagtagagatggggtttcatcatgttgaccaggctcgtctcaaactcctgacctcaggtgatctacccacctcaacctcccaaagtgctgagattacaggcatgatccattgaacctggccacccatgtattcttgattgaaaaactttgcttatgtcttagttctacagctgaccctctttcactgttttcaaggtcaatagctgtgtgttcacacttctgtgttttataaatgttactgtgattttcttgtaaggaaaaattaaaatttgggaatcaatggcatcagaaccttgcaaatgaagtttctttagcccaggcatatgaaagatgcttctctaattttcaaggataggggtgatgaagaccaacccttcccattagcatttccaggccccaatgtaagaagaattcaggcacacattttcactcatctcagacattctcagggtagcttggtgaaaatttctctttctctgagccccagtgagcctccctgcaactaggagatgaggggctagaccagaaaagctcaacctgaatgaccctggtccctgaaatgattggcaaaatagagtacgtgtctgggtatggcttttctcatgggagaggggagtgcccagttgtaattagaattttaaatgggatgcagtaccccaaaaataaaaaagaataaaaaaatgcaaaagaatggaagaaacagagttgtagactcagacacagagaccatcttcgaggcctttctctgtatgaggacatcacagcaaaatctaaagcaggtcacgtcagtccctggcagggaaccctccaccagcttcccgtgttccccaggacaaaaggccaactcctcactgtggctccacagccctgtgaccagggcccctgccagtgtccagcctcctcctgggagcttgccctcatcttatgactccctctgccccagtcacatttgcttttctcttttcccaaacatcaaaacccttcctgtctctggtcattgtccctcctcttactctatgtccctaaatgatcacggcactgtccctttctcctccttcaggtctaggctcagagctgtctcccatgccctcccacccccatctgatgttccctctgcccgtcagtctctatcacgttactcaggttctattatctctgcatcaatcacatcaggaatgctttttgtttttttttttttttttttttttttttgagagacagaatctcactctattgcccaggctgtgagtgcagtcttgtgatcttggctcactgcaacctctgtttcctgggttcaagtgattcttgtgcctcagcctcccaagtagctgagagtacaggtgtgtgccaccacacccagctaattattgtatttttatttttattttattttattttattttatttttgagtctcacattgtcacccaggctggagtgcagtggcacgatcttggctcactgcaactgccacctcctgggtacaagtgattctcctgcctcagcctcctgagtagctgggattacagacacccaccaagcccagttgctttttatatttttagtagacatggggtttcaccatgttggccaggctggtctctgacttctgacctcaagtaatgcaccctccttggccttccagagtgctagtattacaggcacgagccaccgtgcccggctcaatttttgtatttttagtagagacagggtttcaccatgttggccaggctggtcttgaactcctgagctcaagcgatcctcacacctcagcctcctaagtaactgggaccacagacacacagatgtgcacaaccatgcctggctaagtttttgtatttttggtagagatggggtttcaccatgttgcccaggctggtctcaaacctgagctcaagagatctacgcacctcggcctcccagagtgctgggatgacaggcatgagccaccgcacccagcctttgcatgaggtttggtcaggcctgggtctgtgccctaaaggggagctcatcccaccccagctccccactgctgcagcgtgtgtgtgggcttctccgggaggggagtgggagttttcctgtaggagtttattgtccctggtgtggtcggcagcataggggaccgtatttcctcaggatgaggtctcctttgtatgtgttgttgtgttacagggaggggatgtgttgattctgagcaataaacaacatatttctaacattcaggattgacttctaaagactcttggtatgtgaggaagaaacctggaagaggaagaggaaagcaaaggagtcagggatggctcttcctcaggtgagatgatatttttggtggattgttctgtctccttcccctcagaaatgctgggccttggagttgggaatcttctctgagtctgaagcatcctgcctgacaggtttgctcacattcacccatgccttccctcagtccctcttttctcacttagattccatctcttgtgaccgagtgacatgaacttgggaagaggctgcactgggcatggtcctgggaagggctcacacccagacatggatggagacggggtgagggtcccatggtgtcagtgctgttgggcagcagggattgttcagtggccacatgtggatgctctctcagctctctgtggactaggattagagcagctgccaatggaagtcacatattcatgtgcacaaagtacgtggtaaattctagaaaaggcaaccaatatggggaaatgttttctgcctgattttatagtacatttttagttttttgagtgagttactgtgtttctgactccaaaaatcttagtaattagaatggaaagttcatacagacatgaatgatagaagatgttttatcccatcattactttaagaataggaaatcaacctgaatcatagcaggagattcattcaaccattcttagcacattacgctcatggagactgtggggttactgtggagaggcttgtgaaacaggtgttttcaggaaaatggttataatttgtattgtcattattattaaattatgataatattattgtattttaaatatatgaagtcttggtctgtcacctaggctgaagtgcagtggcatgatcttggctcatgggaacctccatcttccaggttcaagtgattctcctgcctcagcctcccaagtagctgggattataggcgtgcgtcaccccgcccagctaattttgttgtatttttattagtgacgggtatcaccatgttggccaggctggtctcaaactgctgatctcaggtgatctgcccacctcagtctcccagagtgctgggattacaggtgcgaggcaccgtgcccagccccaccaattattattaaatacatatttttatatttaaccatcacatgatgtatatatttgttttgtggtaaaactccaagcaaagctgcagcttagactttttgctataaagcatctcctttccctgtcacgtcctccaccctccttccagcctcactggggagccgctactgtcagttcggtgtcaggtgtcagagcaagtctcatacacgtgtatttctgcatcactatgagacttaaaaaaaattctgctgtaaattaaaaaaaaatacttttttgcaaaaattagctgagcacacctgcattactacagatatctgaagatccctccaggtcaggcagttgaaagggtgattgcttcctctaggatggggcatttcctgttttcttagatctgagaggattccaccctgcccccaactgccaatgtgtccttttccagcaagatgagatccctcttcagttcaacaaaacttgctactttttatatttgtaaaaactttatatacacactcacatatacaatatacacacacatatacatctccatacatatacacacacacaaatgtatatattttgaacaacttttacagtttgaaaatctggggaaaatgacaaccctttgtattaacatctagttttttgtgagtctctgtaggtttcattattttgttgacatatatgtatgtcatgacatatatacatgtatgtcatgacatatgtatgtcatgatatatatcgtgatatatacatgcatgtcgtgatatatacatgtatgtcatgacatatatacacatacacacacaatggattttcatactttgagaaatctagttttcatgtattttcttttattttaagactgggtctcaccgtattgcccaggctggagcacagtggcgtgatcttagctcactgcaacctccaccctcaggctcaaaccatcctcctaccacaagctcccaagtagctggaaccacaggtgccatgccaggctaatttttatgtggtttttttgttttcgtttgtttgtttgtttgtgtgtttgttttgagatggagtctctgttgcccaggccggagtgcaatggtgcgattttggatcattgcaacctctgcctcctgggatcaagcaattctgctgcatcagcctcccgggtagctgggataacaggcgtgtgccaccatgcccagctggattttagtttctgatctttcactgtggacgttgtcatctctgaaggcatcacccatactctgtctcatctagatactgaatgtcacttgctgtgtcaataaaagtttctgggccgggcgcggtggatcacgcatgtaattccagcactttgagaggctgaggcaggcagatcacaaggtcacaagtttgaggccaatattgtgaaaacccgtttctactaaaaatacaaaaattaactggccatggtggtgcgtgcctgtaatatcagctactcaggaggctaaggcaggagaatcgcttgatcctgggaggtggaggttgcagtgagtggagactgtgccattgcactccagcctgggcagcagagtgagactccacctcaaaaaaaaaaaaagcataataaaacacagctgggaagacaaaatgtggtgaagaaccccttactcggatttgtcagaacattcactgcaattaaatccatgctttcccctctctcctcttctcattttctgtgaagataagaactcctcccataacaatttccttaaaatgtgttttcatttcagggtctattgacattcagggatgtggccatagaattctctcaggaggagtggaaatgcctggaccctgctcagaggactctatacagggacgtgatgctggagaattataggaacctggtctccctgggtgaggataacttccctccagaagtggggatgtgcccttgtgtatctttgtattttctcttgtttttagatacagtgtcttgctctgtcacccagggtggagtgaaatggtgtgatcatggctcactgcgatcttgaattcctgggctcaagtgattgtcccacctcagcctcccccagtagctggtacaggtgcatgtgaccatgtccggctacttttttagtttttttttttttttttttttttagagaatgttcttactgcgttgttgaagttggtcttgatctcctgggctcaagagatcctcctcagcctcctgagtaactgggattacaggcaccaacccccataactaattattggcttttacttttaaaatttttgcatatgtatgtccttaaggccaatatgagtcttctgtagaaaacatgtagttggttcctgttgattcagccagtctttgccttctgagtgcagagttaaatatttacatttgaagtattactgatggagaagaccttaccattgcatttctgttacatattatctgtattgtagattttttttgttcttcatttctcatttactactttttgtgtttaattgcttttttgtgtagacatgctttgactcccttcttatttactttttttgtttgtttgtttatgatggagtctcactctgtcgccaaggctacagttcagtggtgcgatcttgggtcaccgcaactggctctgcctctccagctcaaccgatccttgtgccccagtggctcatgcctgtaatcccagcacgtagagaggccaaggcaggcaaatcacctgaggtcaggagttcaaaaccagtctggctaacatggcaaaactccatctctactaaaaatacaaaaattagccggacactgtggtgggcatctgtaagccctgctactcaagaggctaaggcaggagagtcgcttgaacctgggaggtgaaggttgcagtgagctgagactgtgccattgccctccagcctgggcaacagaacaagactctgtctcaaaaaaaaaaaaaaaaaattccataacctgcaaaaacttctctttctccaccagaactctttatttatgtcagaattatttgtgtatgttgcattttcatcaacatatatgtatattgtgttttcatgctttttttcttttaaataatagaaaaaaagttgaattatgaagaaaaggtacacttacaacagtttctgtatctgtacttttatttgcctattcatttatttatttatttgttggtgagatgaagttttgttcttgtcgcccatgctggagtgcagtggcacaatcttgggtcactccaacctccaactcccaggttcaagtgattctcctgcctcaatttcccgagtagctgggattacaggcatgtgccaccatgcctggctaattttgtgttttaatagacacagggtttctccttttttgtctggccgatctcaaactcctgccctcaggtgatccatcaacctcagcctccgaaactgctgcgattacaggtgtgaaccaccgcgccctgcctgtctgtcttttaatttacctttactggagaactttatatatatttgtgggttggagtgactctttagacttctttcatttccttttttttcttttttttttttgagatggagtcttggtctgttgtccaggctggagtgcagtggcatgatcttggctaactgcaacctctgcttactgggttcaagtgattttcctgcctcagtcccccaagtagatgggactacaggcacatgtcaccacacccggctaattttttgtattttttttttttttgtagaggtggaggcaggatttcatggtgttagccaggatggtctcgatctgacctcgtgatcctcctgcctcagcctgccaaagtgctgggattacaggcgtgagccaccgcgcccagccgttagtcaattcttattccttataatgctgtgtatatttttgacctcataaattaacatgtagtgatcttaacatgtatttcagttcttatattgtgttctggtggtatatagaagttgtggcttttttcttaacagggaattgtttagaattctgcaggttgtataaatgtacttgttatttgcttgctagttttatgagttacaatattttactaactaatttttatgattgtacataaagcttttcggtatgtggtatgcaatataactgacacagtccactagttaatgtcatttttttttgagacagagtttcactgttgttgcccaggctggagtgcaatggcgtgatcttggctcgctgcaacctctgcctcctgggttcaagtgattctcctgcctcagccttcccgagtagctgggattacaggcatgagccaccacacccggctaattttgtattgttagtagagacggggtttctccatgtttgtcaggctggtctcgaactcctgacctcaggtgatccgcctgccttggcctcccaaagtgctaggattacaggcataagccaccgtgcctggcattaatgtcacattaactggggcactgtggctcgtgcctgtagtcccaggactttgggaagctgaggcgggtggatcattgaggtcaaaagttcgaccacagcctggccaacatggtgaaaccctctatctactaaaaatacaaaaattagccaagcatgctggcatgtgcctattatcccaggtactcaggaggctgaggcaagagaatggcttgaacccaaaaggtggaggttgcagtgagccaagattgggccatagcactccagcctgttgtgacaaagtgaaacttcatctcgaaaataaaaaaatacaaaaatttttaaaagaacgtcataacgtgccttttctgcataggtataggtaattttatgacagtaattcagaaaaatattgtattaacttttattttgagattaagtctcactttgttacccaggctgaagtacagtgttgcaatctcagctcactgcaacctctgcctcttgggttcaagcgattcttgtgcctcagcctcctgagtagctgggactacagacgtaggccaccacgcctggctacattttgtaatcgtttcttaccttttcagtgctatgattgtttgacaatacagaatttccattgattttggttatccttacatgagcttgttgtggattatttaccaatatggtatatcatgtggtcctttagcatttatttgtatacagcaaatatgctgtaaatatgaagaatatatacttttcattggtgtgacggtgatatgttttttgcaaactgttagacactttacggtcacagtggaaaaatactccttactttaggcttatacacatttgtgcactgtcagtgttttgtcgtgatattggaaatagggttccgtagagatgatttgaagcacatgtaatagccctttatctaataaagaatcttacgcttttgtgttcctaaactttgaagatcatgttggggaagtttaaaatgagtattttttgtgtcacatttacacatttcagtattatttaccatctgtactgaactggaaacctattcgtgtttatattttgtagatatctcttccaaatgcatgatgaaggagttctcatcaacagcacaaggcaatagagaagtgatccacacagggacattgcaaagacatgaaagtcatcacactggagactttcgctttcaggaaattgataaagatattcataacttagagtttcagtggcaagaagatgaaagaaatagccatgaagcacccatgacagaaatcaaaaagttgactggtagtgcagaccgatatgatcaaaggcatgctggaaacaagcctattaaagatcagcttggatcaagctttcattcgcatctgcctgaactccacatgtttcagacccaagggaaaattggtaatcaagtggagaagtctatcaacgatgcttcctcaatttcaacatcccaaagaatttcttgtaggcccaaaacccatatttctaataactatgggaataatttccggaattcttcgttactcacacaaaaacaggaggtacacatgagagaaaagtctttccaatgtaatgagagtggcaaagcctttaattatagctcactcttaaggaaacatcaaataatccatttaggagagaaacaatataaatgtgatgtatgtggcaaggtctttaatcggaagcgaaacctagtgtgccatcgtagatgtcacactggggagaaaccttacaggtgtaatgagtgtggcaagactttcagtcagacgtattcccttacatgccatcgtagacttcatactggagagaaaccttacaaatgtgaagaatgtgacaaagctttcagtttcaaatcaaaccttaaaagacataggagaattcatgctggagaaaaaccatacaagtgtaatgaatgtggcaagacctttagtcagacgtcatcccttacatgccatcgtagacttcatactggagagaaacctttcaagtgtaatgagtgtggcaagacctttagtcggaagtcatcccttacatgccatcatagacttcatacgggagagaaaccttataagtgtaatgaatgtggcaagaccttcagtcaggagttaacccttaaatgccatcgtagacttcataccggagagaagccttacaagtgtaatgaatgtggcaaggtttttaataaaaaggcaaaccttgcacgtcatcatagacttcatagtggagagaaaccctacaagtgtactgagtgtgtcaagacgttcagtcgaaattcagcccttgtaattcataaggctattcatattggagagaaacgttacaagtgtaatgagtgtggcaagacgttcagtcgaatttcagccctcgtaattcatacggcaattcatactggagagaaaccttacaagtgtaatgaatgtggcaagggttttaatcggaaaacacaccttgcatgtcatcatagacttcatactggagagaaaccttacaagtgtaatgaatgtggcaaggtttttaatcgaaaaacacaccttgcacatcatcatagacttcatactggagataaaccttacaagtgtaatgaatgtggcaaggtttttaatcaaaaagcacaccttgcacgtcaccatagacttcatactggagagaaaccttacaagtgtaatgaatgtggcaaggtttttaatcaaaaagcaaaccttgcacgtcatcatagacttcatactggagagaaaccttacaagtttaatgagtgtggcaaagcttttaattgaaaagcaaagcttgcacatcatcatacaattcatactggaaagaaacaagtgcaatgagtgtggcaagaccttctgtcacaattcagtccttgtaattcataagaattcatactggagagaaacaagtgtaatgaacgttgcaaaatttttaatcaacaagcacaccttccacgtcatcatagacttcatagtggagagaaaccttagaaatgtgaagcatgtgacaaagtttacagtggcaaatcgagcctcaaaagacaggagaattcatactggagagaaagcttacaaaggtgaagaatatcacagagttttcagtcacaagtcaaaccttgaaagacataaaataaatcatactgcagagaaaccataaaattgtaagagttcgtgacaaggctttcgggcatgactcacacctggcacaacatcctagaatttatactggagagaaaccttacaagtgtaatgagtctggcaaagccttaatgagcagtcaacacttactcaccatcaggcaatccatggtgaaggaaacttgactaatgtaatgattgtcaccaagtcttcagtaacgctacaaccattgcaaatcattggagaacccataaggaagagagatcatacaagtgtaataatcggcaaatttttcagacatcgtccataccttgcagttcattggcgaactcatactggagacaaaccttataaatgtcatgattgaggcaaggtcttcagtcaagcttcatcctatgcaaaacataggagaattcatacaggagagaaacctcacgtgtgatgattgtggcaaagcctttacttcacgttcacacctccttagacatcagagaatgcacactggacggaaatcttacaaatgtcatcagtgtggcaaggttttcagtctgacttcactccttgcagaatatcagaaaattcattttgagataattgttccaaatgcaatgagtagagcaaaccatcaagcagtaattgacattaaagtgtttatgttaagaggattgggccaggtacagtgtctcacacctgtaatcccagcactttgggaggccaaggcgggtagatcacttgaggtcaggagtttcagatcagtctggccaacaaacatgagccacttttcccagtttgctttttgttctttaacaaaaactgatagggatttttatgggtaccgtgttgaatctaaatcacattgggttatataatcatttaacaatattaatttttccaatccatcaatatgggttatatgtctgtatatgtttttaatcatattgatgtatatttgtagatttcaaggtacaaacttctcacctttttacttttatttctatttctttaagttctctagcaaatggaagtgtttttaaattttcttttaaaattgtttattgttacaaacttctcatctttttgcttttattcctaagtatttcttactttaagttctctagcaaatggaagtgtttttaaattttcttttaaaattgtttattgttaatgtatggaaattcagctaatttttggtgctgatattgtactgtgcagatacactgaatctgtttattacttccagtagtattttggttgagtctttgtgattttctacacagaagatcatgtcatctacaaacacatataattttacttctttctttctgatttggatgggtttgatttcttttgctatttcattgctctggctaggacagccagtatttattgaatagaaggggtgagagcattcttccatcatgtgagatcctacaggaaaatcattccatgttccctgcttcgttatctactcgttggtcatttcatggatggcctttctattgttgaggtaaatttccttttctgtctattttgttcagaatttctatgatgagtggattttgaattttgtgaaatactttttctccatctattgagatgatgtggttttcatctttcattctgttcaagtggcatatcacattgatttgcttgactatgttgaaccatccttgcatcccagaaataagtggcacttgagtatctacagtcctttttacatcctcttgaatacagctttttagtacaaggggtcttcaagaagttcatggaaaaatacatattttgcatattatgagaaaattgtgtatgaatttcccagtttttgcaccaaaataaactggtacgaatctgttatgtctgaacaggtcctagtttgaggcacccagaaggataagacatgagttttaaaagagactttctctgccgggcgcagtggctcatgcctgtaatcccaacactttgggaggccaaggtgggtggatcacctgagatccagagttcgagaccagcctcaccaacatggagaaacagcatctctactaaaaatacaaaattagccaggcatggtggcaaatgcctgtaatcccagatactctggaggctgaggcaggagaatggcttgaacccgggaggcagagattgctgtgagccgagattgcaccattgcactccagcctggtcaacaagagcgaaactctgtctcaaaaaaaaaaaaaagaaaagaaaagaaaagagactctatcaaagcaatataaatcctgctaaaattgaaacaaaaaggagcatcaaatttacagtgagaccagatgcagtggctcaggcctgtaatcccagcactttcagaggccaagacaggtgggtcatgtaagcccaggtattcaagacaagcctgggcaacatggtgaaacccccttgtctacaaaaaatacaaaaattagctgggcacggtagcacatgcatgcagggccagctgctgtggagtctgtggtaggaggatagctcgagcctgggaggttgaggctgcagtgagctatgatcatgccactgcattccagcatgggtgatggagcgagatactggctcaaaaaaaaaaatacttcttgtaaagtttgggtagaggaataatgaaatcattgatgctttatgaaaagattatggagatgatgcccagaagaaataaacagtttgtaaatggataacttagtttgagttgggacaagacaatgttgaaggtgatgcatggagtggcaggcacaccatccacatcagtttttttgtttgtttttgttgttgttgtttttttgagatggtgtctcgctctgtctcccaggctggaatgcagtggtgcaatctcggctcactgcaacctctgcctcccgggttcaagtgattctcctgtctctgcctccttagtagctgggactacaggcgcgtgccaccacatcagctaatttttgtatttttagtaagacggggtttcaccatgttggcaaggctggtcttgaactcctgacctcacgatctgcccacctcagcctcccaaagtgtggagattacaggcatgagccaccatgccccttgcacatcagttttacaaaaaaatttatcttgtttgtgccacaatgaagaggactgacaggtaacagcagaaacaatagtcaggagtttgagaacaggctgattaacatggtgaaaccccgtctctactaaaaatacaaaaattagctgggtgtggtggcgggtgcttgtaatcccagttactcaggaggctgaggctgcattatcgctttaacctggggggcggaggttgcagtgagccaagatgggggcaataagagcaaaactttgtctcaaaaaaaaataaataaataaaaaataaaatatgtcaagccccttctcttcctgtctcctctcgtggtgtgtacttgactccccttctcgccagatctcacaggactttcagatttaagcaatacctggccaagaaacaaaagcaaaatcattccattcccccagtggattcagatcaaaactggtaataaaatcaggtacgactccaaaaggagacattggagaagaacgaagcggggtctataaggaattgcacgtgagatggcacacatatttatgctgtgtgagcattacaatcgcgttaccatatcaagctgaaaatgtcaccactatctggagtgttggaaatgttttattgggaatatgttttttctctgaatctgctatgaacacgtcagttgggtgggttcagtaataaatatgtgagacttttcatttcaaaataaaaaaggcaaatgatgtaattgcatagagtaccttaatttctgttttgcttttttttttttttttttttttgagatcaagactccactgggtcagctgatcacacctgtggtcctcgcactttgggaggctgagatgggaggattgcttgagaccaggagtctcctgggaatgttctcatctcccctaacccaattcatgagagacccttggactttactgttatggaaaaatctatattaagcaatatcagtgtgtcaaagcattatgtctgtcacaagctcgtgaaaggaaaataaaaattactaagccaaagagaaaagtcaacctgagaactgcatcagacaaacctgcctcccattttattcctaaatgagatagccacaaagactaaaataaagctacgtagaggccatgcacggtggctcatgcctgtaatcccagcacttttggaggccgaggcgggtggatcacttgaggttgggactttgagactagcctgacgaacatggagataccctgtctctactaaaaatacaaaaattagcggggtgcggtggtgcgcgcctgtaatcccagctacttgagaggctgaggcaggagaattgcttgaacccaggaggcagaggttgcagtgagccgagattgcgccattgcactccagcctgggtgacagagtgagactccctctcaaaaaaaaaaaacttccagcaaacatcatatgttataataatcctttgccacagaagagactcaggtatgataagttcctacgtggagaacaaaatatgagtttctactcggtcctcaggtgccttcccagagatgcccccacattttcctacagcagtggggatgtaggatggactgaccctccccaccacacacacacacacacacacacacacacacacacacacacacacaccctggggaaaagcccatataaagcagttcccatttccctccacaaactgcgggctcccagtgaaaactaccttagacattcttgcaaatcccattcttgtctggccttctacgggatgacaggggcctagagaaggcagtactgggtggagttacctgggtgcgcatttgtcgggatgtggcattttatggctattctaaggtctgttatcagttgtctgtcttggggagaatgtgcagtcgccatggtccaataatcctctatccaaggaccacacaggtcaccgcaggcgctcaatcagcgtgatccacatggtatgatgtgtgctctggcagggcacagacggacacactcagctctgtcaatgtgtaaacagggagtgttgcaatgacatggtttattcacagtcaccatggaatctgatgtggcattttaaaaaatgcgtagatctgttgcaactggtatgaaaacatcacttgtggggaaaagaaagagagatcagactgttactgtgtctatgtagaaagaagtagacataagagactccattttgttctgtactaagagaaattcttctgccttgagatgctgtgaatctgtaaccctagccccaaccctgtgctggcagagacgtgtgctgtgttgactcaagatttaatggatttagggctgtgcaggatgtgctttgttaaaaagtgcttgaaggcagtatgcttggtaaaagtcatcaccattctctaaactcaagtatccagggacacaaacactgcagaaggccgcagggacctctgcccagaaaagccaggtattgtccaaggtttctccccatgtgatagcctgagatatggcctcgtgggaagggaaagacctgaccatcccccagcctgacacccgtaaagggtctgtgctgaggaggattagtgaaagaggaaggactctttgcagttgagataagaggaaggcatctgtctcctgctcctcctgggaatagactgtcttggtgtaaaacccaattgtatattatatttactgagataggagaaaaccgccttagggctggaggtgagacatgctggcagcaatgctgctctctattacaccgagatgtttgtgtgcgtacacatgaaggcacagcacctttccttaaacttatttatgacacagagacctttgctcacatgttttcctgctgaccttctccccactattaccctattgtcctgccacatcccctctcccagatggtagagataatgatcaatactgagggaactcagagaccagtgctggcgggtgctccatatgctgagcgccggtccactgggcccactgttctttctctatactttgtctccgtctcttatttattttctcagtctctcgtcccacctgacaagaaacacccacaggtgtggaggggcaggccaccccttcatcactgattggccgggcgcagtggctcacgcctgtaatcccatcactttggaagatcgaggaaggcagaccacctgaagttgggagtttgagaccagcctgaccaacatggtgagaccccatctctactaaaaatacaatatcagctgggcgtggttgcgcatgcttgtaatcccagctattagtgaggctgaggcgggagaatcgctcgaacctgggaggcggaggttgcggtgagctgagcttgcgccattgcactccagctgggcaacaagagtgaaactccatcttaaaaaacaaaaaaacaaaaaaacaaaaaaccccatcactgattggtgaaagctattgaattagaaatgtaactctgcaaatatatatttaaatattgaataatgaatatctgaatggtgtgtatatacatatatattttgtatgtgatttcagatgcaattttagatattctatgaaattgatattagatattctatgatataaatggttgctttttattttagtgtttaaatgttttatcgttacatttgttcagatgtgtattttctatttatgaattgccacggtttagccagcagtttactacagcactcatttattttctcacagttcatagatgagaaatgtgtcaggtttttctgggtactctgtctggtctcacaaggccaaaatcaaagtcaaagccatgggttctattctagagactgtgggggcagaattcacttctaagctcattcagattgttgtcagaattcatttctttctcctggttcccatatattcaatatacagcatgtgaaatcactctcgtgctcctgagtcctaacttcctccactattgcatctctctgacatatatttcttctttaaggacacataggacccacccagataatccaggataactttcttttatttttcttttcttcttctttttttttttttttttttttgagcctgtcttgctctgtcgaccaggctagagtgctgtggcaggatctcggctcactgctacatccacctccaggttcgagcgattctcgtgcctcagcctccagagtagctgggattacaggcactccccaccatgcctggctaatttttgtatttttagtagagatggggtttcaccatgtcggccaggctggtcttgagctcctgacctcaagtgatccgcctgcctcggcctcccaaaatgctgggattacacacaggtttctctttcaaagtcaaatgaagctgggcatggtggtgggtgcctatatcccagctactgaggaggctgaggtacgaggaacgcttgaacctgagaggcggaggatgcagtgagccgagatcacgccactacactccagcctggtcaattgagcgaaactcagtctcaaaaaaaaaaaaaaaaaattcaaatgactgttagccttcattaatcagtaaattaccagccaaacttttggcaacataacataaacacaggagtagcaccaggagttggagacctggctacaacatcataggaccagtaaactttttggcactgagaaaataatatgtcaatctagctagaaaattattatcatttgggatatttctgttaagagaaactggtatactatatattactaaactatattggtgatactgtatttaacatagttatataactaaacatcaatataattatatagtaatatgtatttaaatattgttaaacaatgtttctatgaaatttctatataatttggtattcagttgtgctcacaagtccatttatttatgtatttatgtatttatttatttattttctgagaccaagtcttgctctgtagcccaggctgggcagcagtgttgcgatcttggctcactgcaacctctgcctcccgggttcaagcaattctcctgtctcagccttccaagtagctgggaatacagtcgcatgccaccacgcccaactagttttgtatttttagtagagacgggatttcagcatcttggccaggctggtctcaaactcctgagctcaggtgatccgcctgcctaggcctcccaaagtgctagcattacaggcgtctgccaccacacccggccatatctggacttcttatatacctccttctactgcggactctacctgtcaaactgaaatagaaaatactcacctgacccacccctctgtctggatggtgagctcagtgtgctggtcatgccagtcagcattatatgagagggcagcagccaggctgctagatatgggcttgtgattctgtgacctcacctgctgtcacaaccgcaatgatcattttacctgtcacagctgtgacagtgcagtcctgggaagctattcttttttaaaaacttcatttccctgttgtaattaccaagaaaacgtttactaattcctagatagcatctccaaagggattttggagtgtctggggagattctttcttcttgatccctggaggcagagagggtctcacaagaaggaagcaggaaatactgagctctggtacatcagggactgaacgcacaccaggtatgtctcagtggattctctgaatccctgagaagtctttccacccaaagtagatttccttataatatttagacctttgatcttttaagttatatgcagataaatggaatcaggcaaagtacctaagaaggattttgagagataaaaaaaaaaaagtaaaaggaagaacatgaagccattagttcacattagaaattttggaactcaccactctgtcttccagaaaatagacctaaagacagatataccatttgacccagcaatcccattactggatatatacctaaaggaatataaattgttctattataaagacacatgcatgtgtatgttcgttgcagcactattcacaatagcaaacatgaagtcaaccaaaatgcccatcactggtggactgggtaaagaaaatgtggtacctatacaccatggaatactatgcagccacaaaaaagaacgagatcatgtcctttgcagggacacggatggagctggaggccattttccttagcaaagtaacacaggaacacaaacccaaatgccacgttctcatttgtaagtgggaggtaaatgatgagaagagagatgcatagaggggaacaacacacactaggaccaattggagggtgcagggtgaaagaagggagaggatcagggaatatgactaatgggtactagaattaatacatgggtgattaaatgatctatacaacaaactcccatgacacacgtttacctatgtaaccaacctgcacatgtacccctgaatttaaaagtcttttaaaaatgaaggaaatctcacttaatctccaaatctaccatttcaatttatcaaatgcacaagatcccatggcttacagatttaattttccatatatattctatattaacacctttgacaaatctcaacacttactattttagttaatttatatactcattaatttatgagtatatgaactgaaaagaatgataatttctacccgactctattttatgatcctttagtatgtcacattacgtagttaggacatgatatcagattgtccattaattcctgtggtaggtgccatcgtactttctttcctggtgtaaaaagaagtaagtctctgtggctatcctgatatggggtcaatctttttaaatctaatttagtcgtgaggcagattcctataattttatactccaatcagtgtatctacattttatcaaggtctttaaagatttattcataattgctatcagtctatgggctaatattttatacatcaatggaaactggtcaaaaccaaaattataaaattaaatgtcacctgcgtaaaatatagagacaaggtataaaatagaaattaaatatgtggccgggcgcggtggctcacgtctgtaatcccagcactttgggaggccgaggcgggcggatcacgaggtcaggagatcgagaccatcctggataacacggtgaaaccccgtctctactaaaaatacaaaaaattagccgggcgaggtggcggtcgcctgtagtcccagctacgcgggaggctgaggcaggagaatggcgtgaacccgggaggcagagcttgcagtgagccgagatcgcgccactgcactccagcctgggctacagcgagactccgcctcaaaaaaaaaaaaaaaaaaaaaaaaaattaaatatgtatgttcattattggaagaaccccgctaactggctttgacagtagagcatggtggttaatgcactctgaaatcagcccagacaagatcagtccctattctactccaaacacggtgtgaatttacacaaatcatgtcacctctctgtgcttgagtcctctttgtctttataatggtggtacctggctcatagattatgaagaatatggaggtgaatacatgtctgttcttcatagcaaagagcaattcattgcaaatacacttaaaatgggacacatccaaatatggcaaactcttcatactagaaagtaactttattaagtatttctattgcatttcagctgactttattttttatttttattttttatgttttgagacagggtctcactttgtcatccagcctggtgtgcagtggcgggatctcggctcgctgcagcctcaatctcctgggctcaagggatcctcctacctcagcccccaccaagtaccagctgccttttaaatgtcgctcatgcatcacgttccctgcaggatcctgtgtctctgaagataagtagcagcctgtgggaactgacagaatggctgctgggatgtggccatgggaacgatcttcttatcgcagactgtacttggaatcctggggatttctctcttatttaccattatctgtccttttacatcactgggtgcaggttaaggtccacagatttgatgatcagacacctaattgtagccaacaccgtattcctcctccctagaggagtcccacagacaatggcagcttttgggtttaggcatttccggagtgattctggatgtaaatttcttttttgtgtccacagagttgtcaggggagtgtccattggcagcacctgcctcctgagtgtctcccaggccatcaccatcagccccaggagctcaggtgggcagagcttaaagggaacgcccccaagcacgctggctcctgtgtgttcctcagctggctcctccctggtcaatatcattgttctcatgcacgtgaccggcaagtggagcaacaaaaataccacaaagacaaaagatctgggatactgttctgctgctgatcacgaggacaccagagagtcgctgacgcggcactgctgtccttccctgatgtgatctgcctggggctcatgctctggggcagcagctccatcgtttgcatcctgcacaggcacaagcggcgggtccagcacattcataggaccagcgtctcccccacatcctcccctgagtccggagctaccaaaaccatcctcctggtgagcacgtttgtgtccttttacactctctcttcacctttcaagtttgtttggctcttttgaataatcccagtcagctggtggtgaacatctctgcaatgatcagtgcaggtttcccagctgtcagcccctttcttctcatgagtggggactcctgtgtatccaagctttgctttgcttagataagtaacacaaaaccccctaatcttatcagaaatatgtgaattggacatgtttgtacaatgtttatgtttcttcattgatctctagagacccataaacacggttatgaaacgaggcttgttagtgctgtgcttgccagcaggggccactgttttattctgtacctcctgatcccccctccacccacaccgccctggagcagctctgtggaaaaagtggaatcagcttagaggttttcgggaggaagacactgaaacgtaaacgttataagaaagtgacggtgcacaaacacacgtgcctcatctctgtgtccctcggagtagacggggggaatgtgcgcagatgcgaagttcttgctgtcattttcgtgatgaatagtaaaatatatattttctcagatccagaaatctcatgccctcagtcaacatccataaactgacaatcttacttgttggcttgcaagtaaggttaaaatttaaaaccttttgcaatttctgataggtttggtgatgctgggacagatgtgactttgtgtaagaggaaggtagaaaggttcttcaccggtgtggttagcggacagaaaacggctttctggaacaagcagcaaattctctcacccaaactggagtgaaatgagagtaaaattcctccactctctaaccctggaatggggctgttgtgtgagagggaggattgaaatgaactgtccgaatgtgatttatttgttgctcattctcctcctggcaggagcaggaaaggacgaagagtccccgaagctgatgctgagttcatggggttgagctgacagcggccaacaggctgtcataaactgtaagcacacgaggcttgttagtgctgtgcttgccaggagggagcagtcttttttttctgtaccttctgatccctccctccacccacaccgcactacagcaggtctgtggaaagagtggaatcagcttagaggtttttgggaggaagacattgaaactccgttttttcattttgttgtgtttttgtttttgtttttagatggaatctcactctgtcccccaggttggagtgcaatggtgccatcttggctcactgcaacctccccgccctgggctccagcctcgtgccatgtttcccaggctggtctcgagctcctgggctcaagtgatctgcccgcttgtgcctcccaaaatgctgggattacagacgtgagccaccatacctggactgaaacacttttagtcctgttgcatgcaaggatttaagtcaccaacgtacgtggattccagcaagaagggtcagtagacgcaggggtgggtaaaggtgctaaggatggtggggtgaagtgtggctgcaaacaggcagaaagagacaagcttctggccctgaatagtcaccaaatgctggatggtgcaatgctaagaatgcagcagaggccgggcgtggtggctcacgcctgtaatcccagcgctttggaaggccaaggtgggtggatcatgaggtcaagagatcgagaccatcctggccaacatggtgaaaccccctctctattaaaaatacaaaaattagctgggcgtggtggtgggcacctgtagtcccagctactcgggtggctggggcaggagaatcacttaaacatgggaggcggaggtcgcactagccgagatcgtgcctctgcactctggcctggcgacagagcaagactccatctcaaaaaaagaaaaagaaaagaaaaaaagtgcagcgcagaccatggtctgaaaagctaaaaaagaatcacaccggctgggtgcagtggctagtgcctgtaatcccagcactttgggaggccgaggcgggtggatcacgaggtcaggagatcgagaccatcctgcccaacatggggaaaccctgtctctactaaaaatacaaaaaattagccgggcgtggtggcgggcgcctgtaatcccagctactcgggaggctgaggcaggagaatggcgtgaacccgggaggcggagcttgcagtgagcggagatcgcgccaccgcactccagcctgggcgacagagcgagactccgtctcaaaaaaaaaaaaaaaaaagaaaagaatcacacctcccccattgtcctggcccctaccacatacacactctctctctcctctctctctctctctctctctctctctctctgtctctctctctctctctctctctctctctctctctctgtctgtctctctctctctctctctctgtctctctctctctctcacacacactcctatcctagcttcctctggtctactggcccttcgcagtcccttacccatgccattgtatagtgtattatacttattagtctgtgattacacggagaaaaaatacaaaacacaaaaacaagaaacaaactcaacagacagggtttaggcagggttcccagtgagggcggaaagagggtcttttgtgctaattcaatgtcctgttcggtttctgcatcagaatagacagtaggaattgatgtgttgtgtgtttttgggcttcgtgtccctatgtaccagaggaaattattccagtctgggttgggtgcaggtagggacgtgtgagactaactctcctgccatttgccacccgttgggggcgagtcattaggattcctatgagtgcctctagcctctgatgtcccaaatcctcactatgcagatgatgttgtgtgtctcggcaggtgagaggagttgctctcaatcttcctgtgtggggtgtgatccccgccctgccagcagaggtaactgacagaacccaaagaaatgcagccttctgttttccggggcaggcttattgaaagtatgtgagcagacttacattgctcaatgatttcagtggtcgacaaaagttgtagatgacaaaatgattttgtcatctgcagcctctggaaaagggaggcagcctccacctagaggtgcctgtggggtcctagttgccctgacgcaatcctgacacaataatagtcacgctgattttgaacattatctgttactttgctgctgagctctcgtcatcaccaaatcctgtcccacagacagcttggggctccccaccttgatattccaattttgagatgggttagtccaaactctacaaaaccccccgaaagccttgcttatgacacagaaatggtgtattctgggaggaaaatggaccggcccagcaacatctcagctctaaaggaaaaatcaagatctatcatcggtgaaaattttatgcccttctccacggtctgaagcaaagctatggcattatggggtcccaaatttaccatgtaacccctaaatgcctggtccaggttcactgatgggtcagggaagtagattcctcacggtggccacagcagaggctgttcgggctcagtgccagccacgtggaacctgcagcaggggcgtttgttccgctcaacggtcagacttggggccaggtgtgggggctccagcctgtaattccagccttttgggaggctgaggtaggcggatgtcttcaggccaggagttcaagaccagcctggccaacatagggaaatgccatctgtactaaaaatacaaaaaattagctggacgtagtggcaggcacctgtgatcccagctacttcggagactgaggtgggagaatcgcttgaacatggaggttacaaaaaaaatcatcaaaactcagggttttggccactgcccacattctagctgtttgttcatccccattcaaactagagactgtctgaggaagcataccctctttgaggctgcaaactggaaacaatctcagctgctgatctaacagttgcatccgtgatttaggagtccatggtaaaggactgttttctgaagcacctgaccaaaatcaagctctggacagagcctgaatctgtctcatgcagagcttgtcactgcaggccgggcttgtggttcttggtgaaagttgatctgtttatctggcggttggggaggcccctgaccattcctggcagaatgagtgcattggacttttgacccacttctggaggtttcaatcatgtcacgccagctgactccagccgcaccacgtgacccttgaaactcattcatgtcaccttttagacttttgggaccattttcactctgacatactgagtctttaatcactaaatctactaaaaatgggccaactgtctgattttacttccttgtttcccctcttgatccatcaatgttgtttagggaatttgttgattgaatgtggctgtctccagaaggagacatccttttggatgtctcttcttgacgtgatctcttcttgacagcctccaggaatgatctcttcttgacagcctccaggatcaggatgaaatcactgggggttatgaatctatttccaaaatatgagatttctctctctgaccattccaggcacaatatgtcattctttctctgaacaggccagtctactttgcccacgatgagtggcagcccagctaaaagcgagttatgggactcaaagttagttacaattaagttttatacaaaaatctttatccctgtttcaccttgctcttagggacaaaatgtcttggagacagtaggggatcatgagaataaagatgaaattataggtaccagaatgggactgactgattctgtggagggagagggagagtgacaacctgaaacctggagagcagtcaacttaggtcctaggagcactgaagaatggagggacattcatcaccttttttccctcataatcacctccgtgagtcccagaaagagtctccctggaaatgatgttgggccaggactgtgttagtttcagttaagccagatgacagggcaggtgctgggggttcctgtgcgtttggtctccacgtcacccagaagaatcctttgggactgttccctccctctgggattctagtgaggagtgtgccctttcggtacccatctgccctccttcctctgtgagctgcgtctcctcctcctgtttttcttccacgtagagatgaatgtatgtttattcctatttggataaaccagagaaacaaatcaagtaatggaaccccagacccagcctccaacatagcctgattcttttctgttcctcttcccactgtactaatttcatcatgtcggtgcagagataccctgaggtggggtctctcagaacagattgcaacaccatacgtgtagagaaggtggttggagatggcaggagtccaatcctgccaatcctgagaatcaaagcttgtgtctgatactacaagtgtatacacaggaagtagatggatccaggaaagatcctagagcccaggaagagattatttagagcaggcaggatccctgcaggagagcagagtagcaggacacaggttcagcagccacttccgaggtcagattctcacagctaagcctctgtggtagggctgatctgcagagcaatgcagagcctgggaaagctctgatcacatgtggaagatgaaactctgggcttctattagtctgttttcccctagctacaaagaactacctgagcgggtaatttatacagaaaagagacttaactgaatcacagttccacatggatggggaggcctcaggaaacttacagtcatggcagaaggggaagcaaggtatgtcttaccattgtgaaaaggagagacagagagagtgaagaaaagcacacacttctaagccatcagatctcgtgagaacgcactatcagcagaacagcaagggggaaatccgcccccatgatacaatcacctgccaccaggcctgcccctggcacgtggggattacaattagacatgagatttgggtggggacacagagtaaaccatgttagagctcatggagaagtgtcctatgtgatggaacatcctgcttctgtgggcgtgacagtctttgctctttcttggcagagaaacacttacaatagtcacttgaggaccatgtatagataggctttctttcttctgagtttcttgaaaaaggattcagaggaaacattttacccactttcagttcgagtgatggtggggagtgacttcagtaaaaatggcagattagggaactcggggtaggagtgggagctgtccatccccagaaatctcagaaggcccagcacaacctgccagaattaacctgatcgaaacttgaacttttttttttttttttttgccatgtagctttattttaaatcagacctttatcttactatgtgttgtaaagaatcgattttgtcactttgtaatgtgtcttatgcactgcagtctatttctgagttgtgagctccacccatctatcagtctgcccatcaaccaacatgtcttacaagactagctaccctcatttcgttctttttcagagttttcttgattattcttatttgtgttttcacctatgagattcttgcaataacatccataactcccaactgaatgtatctatatttgaaccaaattaaatttataaattagcttatgagcaattgatttttataatattgattttttttacccaagtccatgctgtaacttcttatgtgtacatttgtatatttcagaaattttctatttaattcttatatacatttaacatatttgttaaaattattcctaagtatattttattttattgttattttgtaattgcatccccaccccaaatctaacttgtaaattattatctcatatatatgtaaatacctgctgcgtgtaatttaaggccatgtcatgggttcaaactgattcctaacatcaaccattcaattttccccattcactggaatgactactattccatatccacaacaagagctgttgggttgagggaaatcagggtggagatgaagcaaaagtgaagagaaaacattatctaacccacgcatgcagcaaaacaacctccctatggatcaatatgtaattatctaaagtataaaatacttagaaaatattaatatttatctcatactatacaatatggaaattataaggaaaagacaaaagaatacccaattacttatatattccctacataaaaatatatacatttatatggtaaaagattgcattatcgcagtgtaaaatgaaaataggaaaacatataacaatatgtaaaacaagtgacaatatgtatgttagatttaatatcctatagtaaaacagggtaaattaaaactataaaatagaagaaaatttaaatccaagtaaatcatatgagccaaaaactaaataaactaaataaatataatcaataagcatttaatacatcttgactcagtttagatataaaagaaagaaaaatcaaacaataacatggtggttttgccatgatgtcatcaagcgtaaaaagataacctttctcaatagagatgcgtctcaggtttgtgggtctgagtccctcatggactgcaggtgagagagtgaagagacacagccttttctcaattaaagtagaaggatataaatatatatatttatttttgctatactttataatatacaaacacatatggatgattacaccctaatatttgctgtgattctacagaaatgcatgactctcaggagacatccaaaagacagcaaatatctcacacgaaactgaatagtgaacttcatcctcaatgaaccacagagttcaccattctgagtatatcgttcaagttattttcctattttccttccgcaggttctagcatgtattaacaccgtgtgtctaaagtcatccctgctggtcatctggaggaatctgagaaggggcaggtctttcttctgactctcagagcagcaccctctgctggacagggctgggcacctcatctcaagcccaatctgatccaccaacagggtctgttatctccggtccggggaagaggtgggcctctctccatcctgggaggagcgctgagcttctccttcatccagggatgggccccagggacgcgccagtgggactgggagaagccaccctcagcagggaagacagagatgcctgcgtggccgaggcctggaaggtctgcaccatggtgcacagaggccccggagctgggtgaggccagaaagctgctctggggtcagcggggaatgtgcctgctgaatctgcaagcacctgagctacgtcttcacaaatggcctcagacctagagtgcagggagatcccctggcttttctgaagtggtggcaggtggtctcctgggtagcaggatctgggctgcttacttcccttacccagtgagggcccgcggggagctcttaagttgggcatcatgggtctgcgtgatgtggctgctgtgcccacatcagagggtttttgtttcttttccaaagtcaagctgcactaatctagaccagggatccccacccctgggctgcggaccggtccccatgggtggcctgttaggaactggaccgcacatcaggaggtgagcagtgggtgagggcgcatgaccacctgagctctgcctcctgtgagatcagcagcgccactgcatctcagaggagtgccaaccctactgtgaactgtgcatgcgaaggatctgggttgcatgctctttatgagatcaaactaatgcctgatgatctcaggtggaacagtttaatcctgaaaccatccccccgtctgtggaaaaactgccttccaccaaaccagtccctggtgccaaaaacgctgggaaccgctaatctagacagttctctgctaaggaagcacatggttgagaagcatcagaatcgttcccacggaccatgctccggagtctcagcaggctcctgcaggtgagccccactggcctctcctcttccttctggacctcctcagctttggtaatggaaagctgcatcctcttctgtccccagttcctctctgggtgtcaggatctctaaaaccctctcagccgctgagaaatctgtctgtctgtctcacagtgtgtttatccgtgcatcatgaaggaccctcatacggctgacgtgccttggctgatgcgaataacactgcagcaagcgtgggagtgcagatagctcttggaaatacccatttccttcagacgcatactcagaggtaggattgctggattgtttggtcattttgatttttaaaattaaaaagaattttaattctcatattgttttgagtaaaattaaattataacttgtaaggcaactccatgttttttagaatttttaaaaatataattgctctaccaattgactgtcccaacaacaacgtacaggggtattttttttcctccgcatcctcaccacttgttaccttttgtctttttaataatagcaatcctaagacatgtgaagtgatacctcactgtgattttgattggcattttccagatgattagtctattcaggccctttactttttttcgttgttgttgttgtttttgagatggattctcactctgttgcccaggctggagtgcgatggcacgatctcggctcactgcaacctccgccttccggggaggcgtgattagccgccacacctggctaatttttgtactttagtagagatgaggtttcaccatgttggccaggctggtctcaaactcctgacctcaggtgatccactatgcttggccttccaaagtgctgggattacaggtgtgagccaccacgcccagcccctttgctcatctttaatagggttattactattatcatatttgcttttgagttgtgggtgttccttatatattttggatataaactccttatcacgcatagggtatatatggtttaacatattttctcccattatcatgccccaatatcactaagttatatttcacagctccctcttgaacacctgaaaaaattcctaatatatttccatgtgtctgtatccaggttattgtggtttttgcctgaaaacacatttatatatgctgatattccccaataactaatatattttttctctgtttttttttgagacggagtcctgctctgttgcccaggctggagtgcagtggcacgatctcagctcactataacctctgcctcccaggttcaagtgattctcatgcctcagcctcccgagttgctgggattacagacacatgccaccacacccggcaaatttttttgtatttttagtagagacggggtttcaccatatcggtcaggctggtctcaaactcctgacctcaggtgatccacccgccttggcctcccgaagtactgggattacaggcgtgagccaccgcgcctagccctaactaatatattttaaataactttttgctcttggcacatggactaaaaccacatcactaggccttcaatgacgtccaatgtctgccatcttatttccactccagctccgccccaggcatagttgcttttctttttattgaagccttctccttttttttttttttttgagacagagtttcacactgtcgcccaggctggagtgcagtggcgcgatctcggctcgctgcaagctccgcctcccgggttcacgccatcctcctgcctcagcctcccgagtagctgggactacagaagcccgccaccacgcccggctaattttttgtatttttagtagagatggggtttcaccatgttagccaggatggtcttgatctcctgacctcctgattcacccgcttcggcctcccaaagtgctggattacaggcgggagccatggtgccccgccaaagccttctccttgccaagttaattaaagagaatgttttcttcatcaaattagaaattacatcctcagagaagctttccagtatttgtagttcttacaggccacatttattacaagtttatagactccaaacttcttcactgaacagttaataaaaaggacacaggcttattgtaaaataattcatttagtgcctgccattctgattacactagaaatttagttctcctgctccgcgttctgttatgtgactgttcaatgcattacttaaaactgcaagattgaatagagagatcagcttctaacattgatgaatgcaaaccacaagaaaccaagtctcctctgcaaaatgatgaaaacactcgcaaagtcactaaaatcaatcatttcagacttctgaaatttaccaaagccacagaacaaagtgaaaagtatctatcccacagaaagtaccaaacttcagtaagacagcagcatttgtgtcattttaacatgggcatttctgtcaccctccatccttcgttcattgtggagcactgactttgtttggttggttgtttgtttttgagacggagtttcgttcttgttgcccaggctggagtgcaatggcgcgatctcggctcattgcaacctccgcctgctgggttcaagcaattctcctgcctcagcctcctgagtagctgggattacaggcatgtgccaccacgcccggctaattttgtatttttagtagagacggggtttctctgtgttggtcaggctggtctcaaactcccgacctcaggtgatccgccttcctcggcctcccaaagtactgggattacaggcatgagccactgtgcctggctgccctgacttctttcgaagctccttttaaaccctttctgtctccatcttcatgttcaccacagtattatttgctatggccaagacacggaaacaacctaaatttccttcaaaggacaaatgggtaaagaaaatgtgatatatacacattaaaatattattcagccatgaaaacacagaaattctgccatttatgacaacaagaaaaaagctggtagatgttatgccaagagaaataaggaagacacagaaagagaaatattgcatgatattcatttcttcatttctggggaggcctcagaaacgaggtccttactaagatgtggcaggctagttttgtattttagactgctcattaaaatatgtatttattgggccgggcgtggtggctcacacccataacgccagcactttgggaggccgaggtgggcggatcgcctgaggtcaggagttcgagaccagcctggctaacatggtgaaacgctgtctctactaaaaatacaaaaattagctgggcatggggtgcgtgcctttaatcccagctactcaggaggctgaggcaggagaatcatttgaacccagcaggcagaggttgcagtgagccgagatgggccactgcactctggcctggacaacagaacgagactccatctcaaaaaaaaaaaaaaaaagtattaattgcctatggttttaaaaaatgcaagtagtttctgaaggataaactgaagactcttaaacagagcacttctgttttctgagtcaacctttcttgttcagagaatgaaaagatccaggatgcctcacctaacacccaggagggtccctgacttcctgattctaggccctaaacctatgtccaagagaaaagttacatctgtagtccagagctttttaaatatagttatccaggcccctaaacagcacaagaaaatggaagctaactccttacaacttgtgaaagagacaaagtagctgctgcttttttgttgcttattttggattaattaaagtgacatcttttttattctactttcttatttaaaaattaaaaaacaggttgtgttgacttacacacttctccataaaaatacaatatattgattcaatatgaaatgtctactttagtgccagataaattgagaatttgtataccaaattttaacaaatttgatgttctcaaaagaaacagcattattcactttgtttcagatgagactgggcttatgttcacaagtacacactcacagagatctaattccacaggcacacgtggtagagtaggctaagatcatcatggacagtaatgacttgcaatgccatttgacaaatcccccaacagagctctgtaaaaccactagaaaacgcgcacaacagcacaaccatcaaaatgaaaacacctgatgtacagagttgtatagtagttgtatagttagtagttgtatggagcacccttgacataagtaactccatcttagaaaaagactccatcttacatttcatggggcactttgccaacagggacaagatgttttgcttagtaaataaataataaggactgcatccaagcagataaggacataaacaagcacattcttccactatcagtcctccccacaggactctggccataaaagaagctgggcttcagcagctcaaaacggccatcttaactgccaaccatcctgctgtcatttgtgataagcacttgacatctgctgccaaagtttctacccacatcaaagattcttctttgcaagatcaacagacaactcagcccagaccaggagactgtttatgtcttcattactctccccacgcaggttcaagtctgctgagatttggtttatctctgatttattagggagaattggctcacacgatcacaaggcaaagtcccatgataacccatctgcaagctgaggaagaaagaagccagtagtggctcagtccaagtccagaagcctcagaagcaaggaagccaacagtgcagccttcagcctgtggccaaaggcccgagagcccccagcaaaccaccagtggtccagagataaccaggtccacacacgtttgtatctttccacagtgtcaggctttgattgatgctatttcaatcacaaaagccatgagccgcctggagttcccaaagaggcttgtgatggttaatattaagtgtcaacttgattggattgaaggaagcctaggcagctggtaaaggattgtttctgggtgtatctgtgagggtgttgccagaggagactgatgtttgagtcagtggatggagagaggaagacccaccctcgatgtaggtggacaccatgcaattggctgccagctcaggtagaacacagaaggcagaagaaggtgggatacctttgcttgctgagtcttctggctttcatctttctcccgtgctggatgcttccttctgcttctcctgcccttggacatcagattccaggttctttggtctttggactcttagacttacactggtggtttgccgggggccctgtggcctctggccacaggctgacgactgcacagttggcttccttgcttctgaggcttttggacttgaactgagccactactggcttcttttttcctcagcttgcagatggcctatcatgggactgggccttgtgatcgtctaagccaattctccctaataaacttcctttcctatagacatatatcctattagttctgtctctctggagaaccctgactaatacaaggcaattctctttggtactgccccttcacttggtagtcagagccatagacacgcaggctcaagccacttcacaagtcagtcaatattgcaaaccatacatagtagtgtacttaatcaatatatataaatgttatagattaaacatttcacaataaacaaagtaatgtttaacatcaagagaaaagagataggagaaaagggttaacaagtcagtccaaggagagtaacaaaacccttggtcagggctgggcaggcccattggtcttgcaagaagtctttgaggcttcagcagcagatgccaagtgctcatcacaaatgacagcaggacggttgcagttaagatggttatttcaagccactgaagccttgctccttttatggccacagagtcctctggggaggacagatggtggaagaatgtgcttgtttatatccttatctggttggatgcagtctttattatttatttattaagcaaaacatcttgtccctgttggcaaagtgccctgtggaatgcaagatggagtctttttctaagatggagttacttatgtcaagggtactctatacagtagtcttacccacacgttcatagaaacatacaatctcatccatgtcataatgaaggccaaaaacctcacaggcgccctcccttacctgagctccaggaggctccctgatgagtccacacaatcacaaatccagtcacacccaccaatgattctctcccaacaacagcatatattttttagggcaaagcatctcacaccccagtgtttgtctaaattgcaccatttcggaagccccctgctcttttgcagaccttggtcaaagtgaaacatttcacaggggttcaggcagtgagaaatatcctgcctaaccacctgaccacaaggcgaacaaagacccaattaaagaaacattctcatcatgtcctactgggcaaaggcccaactacaaaaaccatccctatcatatctttcttggcaaaggtccaaggaacatcctgatgagatcccaccggaaaaagggccaaaccgcctgatcataagaacatcttgtcaatatcctgccgggcagcaagccatacagcccaggcctctcccgcccataccaaggtaacactcacagagacatctgaagagccaggcagtgctcccaagtctgggacagcatcagagaacgaaacgcaaagtcctgcccttacagagagagccttggcacagacccagtcaggaccaggtcactcccgtggaacctactcaaggtccctacacacatgcctggagctccccaatctactggggggtgggggaaagggcagtgctgaaacgtccccaaaatctcacatgtaaacaccctacctaacactttctagaggcatttccagctcggggctgtatttccaagaacgctctggaggcacagctcttttctaaggagggccatgttgcatgctgggaaatttttgaacttttcccaaatcacagcttttaagctttccgggcttattattattattattattattttgagacattgtttcactcttatcgcccaggctggagtgcagtggtgtgatctcggctcactgcaacctctgcctcctgggttcaagcgattctcttccctcagcctcccaagtagctgggattacaggcacacaccaccacgcctggctaatttttgcatttttagagcgatggggtttcaccatgttgggcaggagggtctcgaactcctgatctcaggtgatatacccgcctcggcctcccaaagtgctgagattacaggcgtgatttctggtcgtttcagactacatttccttcccagaaggacgcggggacacgccttccctatggacggatcccaaatgcaagttgtaagcaattataactgtaggcccctagagcctgaaccacttttcccaggaattttttgtggtgcgccttaggagcaagcaaagtttcagggcaggagaaggccgacagggcttccagcatttgaagattctgccagtctgaaatacgctttcccagaagtctatggggggtgcagctgctctaacagtgggaggagacaccgacgaaaagcattctgacggccgcgcttccagcgctaaggattcccgcgtagtgagcatttcccagaggtctctggggcatggctccattagggccgtgtgcagttgcctgcagggaaacactgatgggcgcccttccagatacgtcgattcccgggttatgagctacatttcccagaagccctcaaggcaggacgcccttagggtcgcgtagagttgcatgctgggaaatcctgacagccgcttccaactctgtggatttccgggttatggactacatttcccagaggcctctgggtcacggctccatttgcgccgtgtagagttgcatgctgggaaacactgacgggcgcccttccagctgcgtcgaagcttctctggtttcgcattacatttcccagagggccttggggcacagtccaatgaggagcgagccgggtggccggctgaggggcgtgcttcatgctcgcgggatttttaaaaatggtttctcctggatcttatcccaactgcgcctgagaccttgtttcacctcctgatgtgctgggtgtggttaggcctcgagccgggagctatttgcctcccaggaggaagccagggcagggttccgcggggaatggcggtgagggagccactcgggacgcggaggccctaaaatgaagaagcttcggcctgaggcttcgggagcggcgagcagggaagtgggagtgtgtgtgagtgtgtgtgtgtgtgtgtgtgtgtgtgtgtgaataagccagaggctgcctggtggggccccgccgtggcccagtgactgagataattgtcttcgtctgtggggtaatgcgaacaagccccgttcccctaagccgtgatgcatgcggggttgacgcggccgggctctgtccccataaactgtgacacaggtgtgtgtagacgtctatgagggccatagcgccgggctgtaagggcatctgtaggggtgacgcagccgggctgtgtctctgcacctccgttctgtgcgaggtcaatgctggtggggtctgcagaggtggcacggccaggacgggtctccgtgtctctgaaatgtgcctttgcacttctgtcaggttgacagggacaggcagtgtccctctggtgtgagcgtctgtgggtgtgaaagggccagcgagtgtgcggctgtgactggtcgggatcgggcctgggtgcatggccttttgagtgagcacaggtgtgtgcgaccatgtcacctgtctttctagtgtctccgttgcttcctgtgccttggccttccagccatgtggtacctgctagggagcagtggtcccaaagtgacgtgagaggctctacgctattgtgaaaatgaccaagaagaaggcttcacaagtcacgagatggcagttttggagccagaagtgctctccgtgcacactacctggacgacaagaggaagtaacctcaagaatagaattccttttggggaagaaagaggtacctgacatgggaggcggggaggtggtgagaggggcagctccatgtttcagaaccccagttcctagagttttccagcatttctctgaaaaactcacatgcctgtgccctcttatttctgattgattttaactgtggtctggggacaagtgtgccctattttctttctttgttttttttttttttgagacagagtcttgctctgtcgcccagggctggagtgcagtggtgcgatctcggttcccaggttcaagcgattctcctgcctcagcctcccaagtagctgggaccacaggcgcacgccaccatgcccagctaatttttgtatttttagtagagacgggatttcaccatgttggcataggtgatctcgatctcttgacttcatgatccgcccccgtcggcttcccaaagttctgggattacagttgtgagccaccgcgcctggacgtgtgcgctattttctaacgtagcttgtgatccagaaaggtcctggtgcctcattcttatcttccttttcccctccggccagctggccttcaggaaaagcatcccggaggaggaagaagaagtgttatatgtcctaaagtaaggtttcaggtgagttagctttttgttcattcaatgatttgtatttatacaacttaagactatttactttccttgggcccatttcttcccaaatagtcatttatcccactaattcctccccaagggatgtgacagggcggtgcaggtcattcctccgtgtatactccattgacctaccctcttctaaaatgtctaaaaattgtctaagaatctgatggtacagaagagattaattctaacactttatattacagtgtggtttggtaaggaagggatttatttttgggtggaaggaaacaccagatatctttggtcttttgtttattttttattattgtagttattttttaacatggttaattttttaaatttttatataattggcaaatgacaaattgtatttattgtgtatatgtttttatatatatgtatacattatgagatgattaaatcaggctgatgaacatatccatcacctcactaattattatttttgtcatgaggacatttaaactctactctcttagcaattttcaaatatactatattttttttttattttttttttcttttgcccttgtcccccaggctggagtgcaatggcatgatctcagctcactggaacctctgcgtcctgggttgcagcgattctcctgcctcagcctcccaagtagctggaattataggcacccaccaccatgcctggctaatttttgtatttttagtagagacggggtttcatcatgttggccaggctggtctcaaactcctgatttcaagttatctgcccgcctcagcctcccaaagtcctgggattacaggtgtgagccaccatgccctgcctttgtcccaatttttaatcaaatttttttttcacactcttgagttgtgtgagtttcttatatatcgtgaatattaactgcttgtcagatgtatggtttgcaaatatttccttctactccataggttctgtcttcactctgttgattgctctgctgtgcataagttttttaatgatgcaattcatttgtctgttagccaccatgcccagccttgatttctttttcaaatagttgttagtctatagggatactattttttttttatactttaagttctagggtacatgtgcacaatatgcaggtttaatccataggtatacatgtgccatgttgttttgctgcacccatcaactcgtcatttgcattaggtatttctcctaatgctatccctcccccagccccccaactccgacgggccctggtgtgtgatattcaccaccctgtgtccaattgatctcattgttcagttcccacctatgagtgagaacatgcggtgtttggttttctgtccttgtgatagtttgctcagaatgatggtttccagcttcttccatgtccctgcaaagggcatgaactcatccttttttatggctgcatagtaatccatggtgtatatgtgccacattttcttaatccagtctgtcattgatggacatttgggttggttccaagtctttgctattgtgaatagtgccacagtaaacatatgtgtgaatgtgtctttatagtaccatgatttataatcttttgggtatatacccagttatgggattgctgggtcaaatggtatttctagttctagattcttgaggaatcgccacactgtcttccacaatggttgaactaatttacactcccaccaacagtgtaaaagtgttcctgtttctccacatcctctctagcatctgttgtttcctgactttttaatgattgccattctaactggtgtgagatggtatctcattgtggttttgatttgcatttctctgatgaccagtgatgatgagcattttttcatgtgtctgttggctgcatagatgtcttcttttgagaagtgtctgttcatatccttggcccactttttgatggggttttttgtttttttcttgtaaatttgtttgagttctttgtagattctggatattagccctttgtgagataggtagattgcaaaaattttctcccattctgtaggttgtctgttccttctgatagtagtttcttttgctgttcagaagctctttagtttaattagatcccatttgtctattttggcttttggtgccattgcttttggtgttttagtcctgaagtccttgcccatgcctgtgtcctgaatggtattgcctaggttttcttctagggtttttatggttttaggtctaatatttaagtctttaatccatcttgaattaatttttatataagatgtaaggaagggatccagtttcagctttctacatatggctagccagttttcccagcaccatttattaaaaacggaatcctttccccatttcttgtttttgtcaggtttgtcaaagatcagatggttgtagatgtgtggtgttatttctgaggcctctgttctgttccattggtctatatctctgttttggtaccattaccatgctgttttggttactgtagccttgtagtatagtttgaagtcaggtagtgtgatgcctccagctttgttctttttgcctaggattgtcttagcaatgcgggctcttttttggttccatatgaactttaaagtagttttttccaattctgtgaagaaagtcattggtagcttgatggggatggcattgaatctataaattaccttgggcggtatggccattttcacgatattgattcttcctgtccatgatcatggaattccatttgtttcctcttttattttgttgagcagtggtttgtagttctccttgaagaggtccttcacatcccttgtaaattggattcctaggtattttattttctttgtagcaattgtgaatgggagttcactcatgatttggctctctgtttgtctgttattggtgtataggaatgcttgtgacttttgcacattgattttgtaagggatactattgattttttaatgttgacgttgcatactacaactttactgaattcatttattatttctagtcattttttgatggagcttttagggttttttatatgtataagatcatgtcatctgcaaacaggaacagtataacttcttcacttcctatttgattggcttttctttttgttgcctaattgctctgcctaaggcttctagtactacattgattagaagtggtaagagtgggaatcctcgtcttgttcctgatatttcaacttttcaccattgattatgatgttagctatgtgcttgtgttatatcacctatattatattgaggtacattcctcaatacctaatctgttgagagtttttgttaggaaagcctgttgaattttgtcagatgctttttctggatctattgtgatgatcatatggattttatccttcattctgttaatgtgctatatcagatttatagatttgtatatgttgaaccatccttgcattcctgggataaatcccgcttgatcatgttgaatgatcctttttatatgctactgagttcagtttgctagtatcttgctgaggatttttgcttttaggtttatcaaaggtactggccggtgatttttcttgtcttgcagtgtccttgttgggtttggtcatgctgttcttataaaatgggcttggagatagtcccttctcttggattttctggaagagtttgagaagcattgtattaggtcttcgaatgtttggtagaattcagcagtgagggcatcaggttctggtctttcatgggagatatttattgcttattcaacctccttacctgttgttagtgtgttcagattttgtatttcttcatgattcaatcttgatagattatatattactaggaatttattcatttcttctacattattcaattttttggcgtagaaattttttttttcttttttttttgagacggagtctcgccctgtcaccaggctggagtgcagtggtgcgatcttggctcactgcaagctccgcctcccaggttcacgccattctcctgcctcagcttcccgagtagctgggactacaggcgcctgtcactgtgcctggctagttgtttgtattattagtagagacggggtttcaccatattagccaggatggtctcgatctcctgacctcgtgatccgcccacctcggcctcccaaagtgctgggattacaggcgtgagccaccgcgcctggcccgggaactaattttttttataccaggcctgcattgattgcattataagaaatataacttgctgggcgcagtgcctcatgcttgtaatccagcactttaggaggccaaggcaggcggatcacgaggtcaggagtttgagaccagcctgaccaacatggtgaaaccccgtctctactaaaaatacaaaaattagccaggcatggtggcatgtgcctgtaatcccagctacccaggaggctgacacaggagaatcacttgaacccgggagttggaggttgcagtgagagccgagattgtgcctgggtgacagagcgagactccatcttaaaaaataaaaaaaaggaaatataacttaaggaagtcctgaatttaaaaaaatgattactcaaggtaaaaaaatcagagttatgaaggtgctggtaccttgtagttattaataaatgtttgaatggataggcttgtgggaagcataacaagtgtatctcaaaaatgtccacaccctaattcatgaatgcaggaatatgtgatgttgcacggcaagggaaatttcagttgtagatggactgaagttattaatcagctaaccttaagatagggagattatcctgaattgtgccagtgggcccaatgtaatcacagggtattagaagtagatgaggggtgccagaagaagagaaagaggtgaggatttactgttaactgtatttactgttaacattttgttaacaggtatgtgtcctgtctcccactcccccactaaacacgtgtgtatgtttgtttctggaacattaaatcctgctaattgatcatgtagatgagttaaagactcttcaaatcttagtttgtgaaagaaatccaacccagccatgggtcacattacatttgtgtacatgtggagaagagagaggcaggccagttatctttctcttgctttgaaaggcttcacgtttacaccttatagaattagagatacgccatttcaaactaatcccatgacagcagattatcaagaaagcctttcagaattagattttctatgattttaatgtttctttgacagagaatgataatcagtgatatctgatgccttccaaatatacacaagtaacatttccatgattatatgtacaagtaacaaatccaaggtatatgaaatccaaatatatgaaatgactaagatggcaacaatttgaaataattacacgaatctcccatatcacatagaacacatgattcagtctcttgctaatattcttgatttggtatctcttctcagattagattctttaaacttgatttctgatgcagaatcatgtctctatttccctagttgctggtaaagagggaacattttcttacgtgtcttagaatcgtttttgctaattctgctgattcaaataaattcatgcttaacatcaggcttggaaagttatttttagttagcattcatgatattgatagctgattgagaagcacatattttagcataagaaaacagcagcctcatgtttcttttctaaaaatggattaagggatatgtaatgtcagtgatctttaataaaaacagctaacttatgtaaagtaattgttatgtattactatgttttatgtagattatcttacttgataattgagatagccatatctcatggtatttatattccagtttcaccagtgaggaaaaagacactgcgaggttagtaactgtcagagttcagaatcacaccctgaaagttgtactgcagagcctgtgttcttaatttctccaaagtacctctgcccaaattacatgtacctttttaaatctactttcttcatttggtaatacatcataaatgctttctcaattatatggatcagtatcactagtaaatgtattttatgtcatgatatagcagatcataatttatttaatctgtcctctactgtcagatatttctttttttttttctgagacagagtctcgctctgttgcccaggctggagtgcagtggcgcaatcagagcccactgcagcctccgcctcccaggtttgagcgattctcctgcctcagcctcccgagtagctgggactacagctgcctgtccccacgcctggatgatttttttgtatttttagtagagacgaggtttcacaatgttggccaggctgctctcaaacaactgacctcaggtgatccgcccaccttggcctcccaaggtgctgggattacaggcatgagccaccgcacccaacctatttttttgatttttttaaaattattctctgaaggctgggcgtggtggctcacgcctataatcccagcgctttgggagctgaggcgggtggatcacgaggtcaggagatcgagaccatcctggctaacacggtgaaaccccgtctctactaaaaatacaaaaattagccgggcgtggtggtaggcgcatgtagtcgcagctactcaggaggctgaggcaggagaatggcgtgaacccgggaggtggagcttgcagtgagccgagatcatgccactgcactccagcctgggcgacagagcaagactctgtcttttaaaaaaaaaaaaaaaattattctctggagaagtggaataatatcaattgattgcatcaatgacagtgtcctagttgtggtattacactgtagttcaatcatcattggtataaatcaggtaaaaggtaaacaggatctctctcgctgtattgtttcttacaactgcatgtgaatctttatctccattctaaagaaaattcacagagaaaaaattccctgaatattcttgcacaaacaattgtgtatgactatagctgtgtccttcagataaattttgaaaaccagtattttgagtcaaaatcaagacttgttaagtgtctgcagtacgccaaactctgtgatattagcacgaagaatgagagaataactaaaaggacacagctgctacctgtatgttgtctataacccagcaaggaggggaaactgagtagaagcagctcagggcagcctgtgatcacggactgtggggaattccaggtgatgtaccttgagaggtgctaggaagggaacatcattctgacagcacccgctcgggtaggccattcttgcattgctatcaagaaatccctgagactgggtcatttataaagattatattggctcatgcttctgaaggctgaaaaggaagcatggtatcgacatctggcatccacttggcttctagggaggcctcaggagcttttactccactttacttggaaggtgaagtgggagcaggcacgtcacatggcaaaaggaggggtaaggttgggacacagcgctggcgggaggtgcgggggatgccatgtacttttaaatgaccagattttgcaagaactcactcaccatggccaagacatgagggatctgcctccataacccaaacacctcccaccaggccgcacctccagcactggggatgacagttcacctcccaccaggccccacctccagcactggggatgacagttcacctcccaccaggccccacctccagcactggggatgacagttcaactggagatttagacggggcaagtattcaagccataccgcccacggatgtcgatttataaccaaataattctgaattcacaggttccatgtgtaggtaaatacaatttgttttataacttgtatttttctaataatgtttgatgcaaagggaagaccaatagggtaaggcgaattaatgcttgtctgctgggccatcatggcttgaaggacaagttcagaggtaaaattcacactcccctcagacgtaaaaggaagcagcctcaaaacaactgtcggtatgtacagggcatcacttggcattttggccatttttccagtcagtgctccagcacatgtggaaatatgtgtctgtgtgtgcatgtacattggcatccgcaggggtaaccgggacctgatgtgtgagtagaagacgcacttgcgtgggcgtgtgtggggttgatgtgccagctctgtccccataattgtgacaggtgtgcgagtatcttgggggcaatgggacccatgcagggtgaccatccttacagagggaggtcagctacacagtctataaccccagttaatacaatgtagaccccaggaatctctgaaacactctgatcccagtgccctctgacttctgattgtcatagatatggcctgagggcagctgtgccttatgaggtattttctaatgtaggctgcgcacctagaaagaccctagcttctcagtcttatcctcctctttcccctaaaccaacattcttacgaaaaagcacgccttgagaggaggaatcatttacccatcttaaaatcaaggttcaagtgagttacgttttattcattaaatgattagcgtttataagacaggactatttactttccttgcccctaaatattctcactataacaacttatcccggtcatcctttccaaagaggtgttgggggttcatacagggatatccctcaatgtactccccattgaccaagtctctcttctgaatgttattcatgtgcctctttggcaaactgtgtagctttttctgtgtgctctgctcttctaagaatctgatgatatagaaaaatatacctcctggagcttaacattagtgcgtgatattagaatgtggtttgctaaggaaaagattcgtttttaagtggaatcaaacaccacctatctttagtcttttccctaagcctgattttcatatcacagccagaaagtagatcgtttgagtacgtgacaaggttgtcagctttgtgaggcttttaagagtggagtttgagcaaacttctgtgtcatcaaaggcataaatgttttccaagtaatcaataaattgaaattttttctgtttactagattttctttgaagctgacagcctcagagttgtttttttccacttgctttgtgtgcacagtgagaagcaatgtggtttgattttgagtatgagttctggatctaggacagagttggcaaatttttttctgtaaaacgttcagcagtaaagggatttatgggccacatatagttctgtatttttcttctttttatttatttattcggattattgttgttttgtttattaaaatgacatcctttattttttatttttatttgataaataacaaattatgtgcttattatgtacaacattatgttttgatatgtgtgtgcattatggagtgatgaaaccaaagtgaataacatacccttcaccttactagttatcatttttgtgattagaacatttaacatctctcagcaattttcaaatatacattgttattcattatagtcaccaggttataaaatagatacgcagaatttattcctcctctctagcctttgtagccattcatctccctattcccacccctgtcccagcctctggtaaccatcattccactctttgcttctatgagttcagctttttgacacttaaataggtgagataatgcaggtggacctttctatgcctggcttatttcacttaatatgatgtcctctaggttcacccatgttatcacaaatgactggattttcctggtttttaaggcgaatagtatttaattgtgatatatgccacattttctttacccattcctctacagattaacatgtaggttgatttttttttgtttccccctggggtattgtgaataatactgcagcaacttgggagcattccttcctctacaactttttggaagagtttcagaagaatattttgtgaatatttggtagaatacagcaatgaagccatcatcaagtcctgggctgttctttgatcagaaattctgtattatttgttcaatctttttactcattactgatgtgttcagatttttctgtttattcatgattccatcttggtaggttgtgtgtttctaggaattaatcttctaggttatccaacttttttggcatctaattgttcattgtagtctctcacgattctttgtatttctgtggtatgagttgtaatgtctccattttcatttctgattttattgatttttgagtcttcccttttttgtctttgaaagtctcatggtttttcaatgttgtttatcttttcaaaaaatcaactcttagtttcattaatcttcccatattgtttatttagtctccatttatttttattccgacttttattattcctttcattactatgagtgtcatttgttctttttcgagttccttgagaagtaatgtttgtttaaggtctttctcctttcttaatgtaggtgtttattgctataaacttccctcttagaactgcttttcctgcgtttctcaagatttggtatgttgtttccttttgcatttatttcaaaatatttttaaattaaacttttaacttcttccttgacctactggtacttatcatgttgtttaatttccacatatttgtgaatttacctaaattcctcctgttattgatttctagcttaataccactgtggttgaaaagatgcttgataggatttcagttgccttaaatttcttaagacctgttatttggcctaatatgttatctgtcctggagaatctttcatgtgtgctggagaagaatatgtattctgctgctgttgggagggatgctctgtatacatctgataagtccatttggtctaaagtaaaattcaattccagtgtttccttattgattttctgctgaataagttgtcctttgtcgaaagtaggatttgaagtccccttcaattattgtattgcagtctgtttgtcccttcagatcttataatgtgtgctttatatatttacacgatccaatgttgggtacatacatatgtacaattgatacatcttcttcatgaattgatccctttataattctataatgactttctttctcttcttatagtttttgacttaaattctattttgtctgatatacgtacagttgacccttgaacaacatggagctggggcgacaactcaccatgcagtcaaaactccacatttaacttttgactccctaaaaatgtaatagcctactgttgaatggaagccttattgattacataaagtagattaacacaaatatagaatggtatatgtgttatatgcaatactcctacaataaagtaagctagagaaaagaaaatgttattaggaaaatatgccaggcatggtggctcatgcctgtaatagcagctgttatagcagccaaaacggactaagacaactgtattgctgagacacagtgaaaggtcattcaagatcagggggtgacatcttaagtcctagaagtcaaaagtctaaagtgggtctcactgggctaaaaccaacatgttgaagactgtgttgctttttggaggctctaggaggcattctctttcatggcctttcccagcttctagaggctgcccagattagctcatgaccccatcctactttttttttttgatacagagtctcactctgttgcctgggctggagtgcagtggcaccatctcagctcactgcaaactccacctcccagattcaagcgattcttctgcctcagcatcctgagtagctgggattacaggcatgcaccaccacactcggctaatttttgtatttttttagtagatggggtttcaccagttggccaggctggtctcgaactcttgacctcaagtgatccgcccacctcggcctcccaaatgctgggattacaggtgtgagccactgcgtccagccctatcctacacctttaaacccagaaaagacaagtcaagttcttcttgtatcacctcattccccacctgtttctgtcatcacatgtttctcttcttcagaactccctcacctacttttaaggaactttgtaattgcaccaggcccacctagataattcagggtaatctccgtatctgaagggtggctggttagcaatttaagtccatctgcaaccttctttatcttgccttgtaacataacatattcccaggttccagatgtaggatgtggatatattctgccagtaacaggcctgtccatcaaactttcctgaatagctagaatgtacccactcccctataacaatggtctgttttccttactaatctttttttaaatttggggctccctataattatatactttataatgggattaatgaaagcctgtaaccaaaaaaaaaaaaaaaaaaaaattattcccctaagaagcacacaaagaggaaactaaaaattacccttatttatttatttatctatttatttattaagacagagtcttgcttttgttgcccaggctggagtgcaatggtacaagctcggctcactgcaacctctgcctcccgggttcaagagatctgcctcagcctcctgagtagctgggattacaggtgtctgccacacattcagctaatttttgtatttttagtagagatggggtttcgccatgttggccaaggctggtctcgaactcctggcctccagtgatccacctgccttggcctctcaaagtgctggggttacaggtgtaagccactgtccggccgtaattacccatatttataccatctaaagataattactgttaacacttagtatgtatgtttactgtcttcccctccacctctaagcatgtgtgtgttttgtttctggaacattgaatcctattaatcatgtaaatgaggcaaaaactctccaaatcatagtttgtaaaagaaatccagcccaaccacgggtcacattatgtctgtgtgcatgtggagagaagagagataccagtcatgtttccttgctttgaaaaattaatcattgatgaatatgaaaatagtcactggataccttacaaatatggactttggaaatattcccaaggttatatgtgcaagtaacgaatattgactgtaacatttcaaaggtatatgaaatagaatgagatagcactagtttaaaatgttcactttttttttttttttcttttttgagatgaagtcttactctgtcacccaggctggagtgcagtggcgcaatcttggctcactacaacctctgcctcccaggttcaagcgaatctcctgactcagcctcctgagaaactgagattacaatctcaccaccatgcccggctaatttttgtattttcagtagagacagggtttcaccatgttgcccaggttggtcttgaacttctgacctcaagtgatccgctcaccttggcttcccaaagtgctgggattacaggtgtgagccactgcacctagctgataagaatctttaaactagattttttaaggaactatcatgtctctgtctccctagttaaaaggaaatagcagacttgttacttttatgaaaatggattgagatatgttactgattttttagtaataacagctaccttatcttaattgttatatatgactgtgtgtttcatgtggatgatcctgttcaaacagtcatacattgtactatctttcttgtggttttaccagtgaggaaactttaccacactgtgaagttaataactatcagagctcagattaacaccctcaaatcagaccacagagcctgtgttaatttcaccaaaacatgtctgctcaaattatatgtaccattttaacctacccttttcccttgttgattcttcagaagttttcttaattaatgagtcagtattattaggaaatgtactctatgtcattgtataacagaccatggtttaatctgattttcctttatcctccactgcaagattttcatttttaaaaattattctcgactgggtgtggtggctcacgcctgtaattcctgcactttgtgaggccgaggcaggcggatcacctgaggtcgggagttcgagtccagcctgaccaacatagagaaaccccgtctcttctaaaaatacaaaaaaaattagccgggcgtggtagcgcatgcctgtcatcccagctactggggaggctgacgcaggagaaccccttgaacccaggaggcggaggttgcagtgagccgagatcgcaccattgcacttgagcctgggcaacaagagcgaaactccgtctcaaaacaaacaaacaaacaaacaaaaaattattctctggaaattctgggtaacgtcagtggattacatcaatgttaatcttctggttgtggtattatatactacaatcaccagctgaggtaaccaggtgaaaggtacacaagatctctcaattttatttcttgtaactacatatgaatctaaagtctatctaattaaaagagaaaaagattttcagaaaaaaagcattttgtgaacatacttcaacattgtgtacaactatagctacttccttggcataaataccaaaaagtgggattttgagtcaaaatgagactgtggttaagtacctgcaacatcctgtagaccctgtgacgttagtacttggaatgagagcgggactcacggggcataactgctacctgtacattgtttacaatgcagcaagcaagggacaccgaatagcagctccggcagcctgtgctagcggcctgcagagaattccaggtgacgctccagaggggctaggagaggatacccttctgaggacagccatggctcgcccggcatcaccccactcaagaggccagacggggtcccagctggggtgacacagctcctttcccagtcgggaaggggcgtctgcagggaccaggaagggcttagcttggggctgcccgctccggcaccgacctgggacgcgccctgaggcccctgcctgggaccgtcccggactacatttcccagagaccatccaggagtacgccgtgctgcatgctggaacacggggcttggggctctggtttcccccgacggccccgcgtcctcttctagcctcaccctctcccgaggccccagcgttgggggactaccgggtgcgtctgcggctttgggagagtgggaggagggaaagggatgggaggggtgcacgcacacgtgtcagtgtgtccgcgtgtcagcatctgtgcaggcgcacgtgtgtgtcgggctctgttgtgtctgcacatgcgtgtcggcatctgtgcgtgcgcacacgcccgtcagggtctgtgtgcccgcacaggcacgtcaacagctgagcacgctatgtatcgggggtctgtgtacgctcacatacgtgtcggggtctgggtacgtgcacatacgtgtaggggtctgtgtgcacatgcgtgtcgggctctgctgctgtctgcgcgctgcggccgctgggtgcgcgtgcgcatgcgcgctggcctccagggggtggcgggaccgagtgtgtgacgcacttgcgtgggagtacgaggctgacgcggcggccctgtccccgtaactgtgacacgggtgcacgcgagcgtcattgggggcgatgggggccgtgctgggtgcgcgtttgcaccagtgacgcagccgctgcatctccgccagtccgcgcaggtgagattggtgcgcgtggctccgaggggagacgggcacggggcttctgacggtgacgcacttgctggagagtgtggggtgacacagccgggctctccccataactggtgaccgggggtgctccagaggctttgggtcaacgcagcccgtgcctgtgaacctcggcggtgcgtccctgggactctgctccgtgaggtgcgctctgggggttgtgcgggggcagcggtcgggacgggtctccgtggcccacggatgcacctctgcaccgtgtggggtggtggggcccgtagcatggccgtgctgggcgttagtgggtatgaggggcgcagatgtgtctcaggacagagtgagctgtggtgaggctgagctgtgcagacttgtgctgggatgggtgatcgggccttctgggtgacgcaggtgtgtgtgacaacacaacctgtagcttcagcgtctctgtgctgggatggatgatcgggccttctgagtgatgcaggtgtgtgtgacagtgcaacttgtagctccagcgtctctgctgcttcccctgccttcacctcctaaccaagcggtacctgcctgagaacaagggccgcggagggacgtgagcgcctgagcctcgcctggaaattcaccagcaagaaggcagaaacagccatgaggtgacgctttcagagccagaagtgctgtgcatgcaggccacctgagtgacaggggacggtggcctcaggagtagaattcctcctgtagagggacaggtccctgatgtgggagacagggaggggggcagctccacgcgtcatcatctcaatcgccacagcgtgctcttcaggaatctcccagaaactccatctcggggcctcgtatttctcattggttttattaggtatggcaggtgttacccttccggttctgttttccccaggccagcatccttcagaaaaagcatccccgaggaggaagacgaatcgttaaacatctgaaagggtcaggtgagtatccttttttttttatattaaatgatatgtgtttataagacttaagaccaaacattaaaggtagatgaccaagatttgagtcctgtttctgcctcttagctttttgagccttctgaagataggcttgtgaggagggtgaaatgcattaacacgcataaaacccatagacgcgcacccctgagtgggagtgcacagtgagtgctgctgttttgtgctaagtctggatgtctgtacatcaggagcaacgtacatatgaaggtaactgggatgggtgtttgcaggttcacaaaatgaaccacagcctcaaatggcctagaactgttatccttaacctgagggcctgcctttaactccacttacaactttccaagggacattctgtgtatatttactgtatgtgattatcagtgttagtgtatctgtcccccaccaccaccaccctaaggagatactctgtaatttcatggcattaagaaggatggacatgccccaaagacatttagacccattggtctacaatcgaaggctgtgtaccttgaccacaattattgttcaggatggtggaaatggttaagtaattataccacgttcatttcatggaatactctgcagctacaaagaagtaagtttagttataaccgtaagaaagaaaaatgcacctgacataatattaaacactactaatagttattaacaatagtaaatgaaggaaatgcttcagttgcctacaaattccattgaataagatttttgtaaataccttatccaacatgacattttagtatattatttaggattattcatgaatccttcaaaagagaggagcctggccacatttattgagcgcatttttgtaccatactctattgtgttttgcacacactccttaatttattcttaccttagtctgtaacaaagtaccatagaccggtggctgaaaccacaaacatttattgctcacagttctggaggctggaagtctgagaagagggtaccagcatggtcaggttctgatgagggcccttttccaggttggagactgtcaccatcttgctgtgtcctctcacggaggacatgtgtgtgcttggaggctctttggcagagctctaggaggtgtgtgtgcttggaggctctaggagatagtctttttttttctgtaattgagatggaggcttgctctgttgcccatgctggagcgcagtggcacaatcttggctcactgcaacctccacctcccagattcaagtgattctcccgcctcagcctcccgagtagctgggattacaggcacatgtcaccatccgcagctaatttttgtatttttagtggaaacagggtttctccttgttgatcaggctggtctcgaactcctgacctcaggtgattaattagccggcctcagcctcccaaagtgcgggattacaggtgtgagccaccgagcctgccctgtgggaggtattttatgtccttgcttttgctggcttctagacactgccccacatgccttggtttgtgaccccttcttccatcatcaaagctgcaaagacaggccaagtcccttttccatcacgtcactctgaccctacttctttctgttcatctcaccctcttctcattttgaggaccctggtgattacattaggcccgctgaggtaactcaggataatcttccctattttagtgtcagcccattagcaattttagtccgcctgcaaccttaattcccctttgccatgtaaggtaatatcatcataggtgccagcattaccatattgacatgtttgagagaggcaacgagagaacaataatcatatttcttttcttttttttttttttgagacagagtttcgctcttgttgcccaggctggagtgcaatggcgtgatctcagctcgccgtaacctctgcctcctgggttcaagcaattcctgcctcagtctcctgagtagcttggattacaggcatgcgccaccacacccagctaattttgtatttttagtagagacggggtttctcttttgttggtcaggctggtctcgagctcccgacctcaggtgctctgcctgcctcggcctcccaaagtgctgggattacaggcgtgagccaccgtgcccggcctatatttcttcttttatgtgtttttgttttgttttgttttgttttttccttatagacaaggttgtgttctgttgcccatgctggagtgcagtgggttgataatagttcacagcagcctcaatctcctgggctaaagtggtcttcccacctcggcctctcaagtacctgggattacaggcaccagccactgtaccctgctcctatcttgttatatttcttataataggattaatgcaggcctgctgggggcaaagaaagaaacagtccctaaggagcccttaaagaagaatctccaaattacccataattgtaccatccagagataatcactgatgaacattttaaatggccagcactttgggaggccaaagcgggatgatcacttgaggccaggagtctgagaccagcctgggcaacagtgagactccatctctactaaaataaaaaattgaaaaagattagccaggcatggtgatgcatacctatagtttcagctactcagaaggctgctgtgggaggatcacttgggcttaggggttccaggctgcagtgagccattgcactctagcctgggcaacaaagggagacagtgtctcaaaaaaaaaaacaagaaaaaaacatctgaaatggtatttatgtttctaggcctcttctttgcctctaagcatgtgtgtgttttgtttttggagtattgaatcttgctaattcatcataaatgagtcagagactccaaatcttaatttataaaaggaatccaacccagccatgagtcgcattacacctgtgtgtgtgttgggaggggaagggctatgccagtgatctttgccttgttttgaaatatctcacatatttctaccttgtaggattagaaatccatcatctgaatctaacctatggtaacaaattttcaagaaagacagccttttagaattagattatagaatgttaatgttcctttcccaggacatcacaataatcacccatgaacactaatcactgggtgccttgcagatacggactttccatgtgacattagcaagattatttgtacaagtaacaaatatgggctgtataagtaacatttccaagatagaaaaagaattagatgacagtatctcatatgtatctcccttatcccgtggaacacaaaattcagcctcttgctaatgttctcaacttggcatcttctcagattagagtcattaaattagattttcttatgcagaacaatgtctctgtccccctagttgctgatggaaagggaacatttcctcgttatatttcttagaatctcttttgctaatgtattcattttgttaaacaaaatgaatttcattcttaacatcagactctgaatgttatttttggttaatattgattacgcagacagcgggttcaaggaaggcacttttgtttttcttgagacagagtttcgctctggttgcctaggctggagtgcaatggcgcaatcgcggctcaccgcaacctctgcctcccgggttcaagcgattctcctgcttcagcctcttaagtagctgagattacaggcaagtgccaccacgcccagctaattttgtatttttagtagagacagggtttttccatgttggtcaggctggtcttgaactcccgacctcaggtgatccacctgcctcagcctccgaaagtgctgggattacaggcatgagccaccgcgcccagtggcacattttaccattagaaaaaaaaggagggggccaggcatggtggctcacacctgtaatccaaagcactttggcaggctgtgaggcaggaggatcgcttgagcccacaagttcaagaccaacctgggcaacatggtgagaccctgtctctattatgaatttttttatttttttgagacggagtctcgccctgtctcccaggctggagtgtaatggtgcaatcttggttcactgaacctccaccttccagttcaagcaatcctcctgcctcaacctcctgagtagctgggattacaagcgcgcaccaccatgcccagctagttttttgtatctttagtagagacggggtttcaccacgttggccaggctggtctcaaactcctgacctcgtgatccgatccgcctgccttggcctcccaaagtgctgggattacaggcatgagccaccacgcccagccttattatgaattttttaaaaataaaaactataaaaagaaaaactttttttaaagaaaaaaagcaaggagattggccgacatgagttggtcttcaataataacaggtaacttctattacacaaatgtcacatattattgagtgttttacatagattatcatacttgccagttgtaacaatcataccatgtagtacttttattacattttatcagtgacgaaacagacactatgaggctaactgccagggttcagattcacatctctaaagtcagaccacacaacctgtattcttaatttcatcaaaacatctctgcccaaattatatacacctttttaatctaccttcttcacttggtaattcatcataaaaattttctcaagccagacgcggtggctcatggctgtaatcccagcactttgggaggtcgaggtgggcagatcacaaggtcaggagatcgagaccgtcctggccaccatggtgaaatcccatctctactaaaaatacaaaaattggctgggcgtggtggcatgcacctgtagtcccagctactcgggaggctgaggcaggagaatcgcttgaacccgggaggcggaggttgcagtgagttgagatcacgccactgcactccagcttggccagagcaagactccgtctcaaaaaaaaaaaaaaattctcaataagaatcgatattattaggccgggtgtggtggctcatgcctgtaatcccagcactttgggaggccaaggtgggcggatcacgaggtcaggagatggagaccatcctggctaacacggtgaaaccccatctctactaaaaatacaaaaaattagccgggcgaggtagtgggcacctgtagtcccagctactcgggaggctgaggcaggagaatggcgtgaacccaggagacagagcttgcagtgagccgagatcacgccactgcactccagcctgggcgacagagcaagactccgtctcaaaaaaaaaaaaaaagaatcaatattgttagtattccatgccatcatatagcagaccataatttaacccatcctctactgtgagatactgctatttttttcgttgttgaaactgtattctctggaaatcatagataagatcaaggagggaatctgtgtcactatcctggctgtgatactgtactgcagttttgtttttcttttttttgagacggagtctttctctgtcacccaggctggagtgcagtggcacaatctcagctcactgcaacctccaccttctgggttcaagcaattctcctgcctcagcctcctgagtagcggggattacaggctcccaccaccatagccagctaatttttgtatttttagtagagacggggtttcaccatgttggccaggctggtgtcgaatttgtgatctgcctgccttggcctccaaaagtgctgggattacaggcatgagccaccatgcccggcctgtactgtagttttataaggtatcactactggtgtaagtcaggttaagggtgcactggatctctctgtattattatttacaactacatgtgaatctacagttatctcagttttttagaaaaataacttacctagaaaaaaatttttcttgatcgctctttcacatacatttatgtacttctgttttcttgtctttctaactgtttcctcctcctggacccataaattccacatgtggaattttgagtcaaaattagatgtttgttaagggcccgcactatgccacaccctgtgacgttagtacttggaatgagagcgtgactaacggggcataactgctgcctgcacattgtttacaatccagcaagcaaggggcaccgaacagcagctcgggcagcctgtgctgtggcctgcagagaattccaggtgacgccccagagggcctaggagaggatacccttctgagaacagccgtggctcgcccggcatcaccccactcaagaggccagacggggtcccagctggggtgacacagcgccagtcacatccactcatggacactcagtaggccacactcccgatcacccagccacagtcctagatcagtcactgactcacagtctgccacttgtatttccattgtctctgggcttcctctgccttcaccttccaacagtgtggtacctgcctgagagcagcggcccccagtgggacatgagagccaggaccctgtcattaactgaaccaacacaaagggcacagccattgtcatagataagtgttcaagccggacgtgttctccgtaccggctcctgtgtcacagtaacgggaagcctcaggagtgggagtccttgtggagggagaggtgactaacttggtaggtgagtgtcgggagcatcacgtgttctagaatccagtaaatacacgttagtccccaagaactctgaaactcacaaatgccagtgtcctctccattcggattggtttcggctgtggcctggggacaggcgtgccctggagggtatttgctaatgcagcctgtgctccagaaagaccctaggttctcattcttcctttcccctaggctggcatccttcagaaaaagcatcctgagggggaaaaaaaaaaaaaaaaaaaaattattatttaggttggtgcaaaagtaattgcggtttttgccattatgtctaatgtcaattgcttttgcactgacctaatattatatatctgaaagtcggctctccacatgagttaccttttttgttcattaaatgatttgtgtttatatgacttaggactctttactctttatggccccaaatatcctccctaatagcaatttatcccagtaattcctccccaggggatgtggcaagggccaggcaggtatattcctctctgtaccccctggttgaccagccctctcctttgagtatccacaaacccatttgtcaaattgttgacatcctgctgtgtgctctggttttctaagatctgatggtatagaaaaatcccccctaaaaaaaaaaaaaacaactccctcctagaggttcatgttagcgcgctttattttacagtgtgcttgggtaaggaggggattcgtttttaggtggagtcaaacacagatatctttggtcttttccatgggactgatttttagagcacaagaaaagagaaagttagtttgtttagtctgtacctggcaaagttgtcagttttgtgaggcctttaagagcggagtttgagctaatttctgtgtcatcaaaggcagagatgtttttcaatatgcagtaaatcgaaatttgttctattcacttggacttctttgggcggacagcttctgtttttcttcagttccccgtttgtgtgaactgtgagaaaccatatggtttaatgttgagtatgagttctggatctagggcagaggttggcagctgtcttcaatggcaatttgtgtatgtttatggtctacagaggctttgatctgtgtttatactgcagattaaatcaagctgattaacatatccctccctcaactcactgataatcatatttgcaatgagaacatttaaatctagtctcttggcatattcaatattattcattatatttagtcaccatgctagacaataaatctccagaaattattcccactttatctcctttaatcttctcattccccatcaccctcccaggccctgacgaccacctctcttcttctgtgagttggattttttttacactccacatgtaatgacatcatgcaggatttgtctgtctagcttatttcacttagtacaatgtcctccagatttacccatgttgtcacaataacaggatttccttctttataaaggctggatggcattgcattgtgttatctctaccacactttctttattaattcctgatgagtatgtaggttgattccttatcttggctactgtgaataatgctactgcagtgaacacgggagcacaggtatcgccatgacatactaatttcattttctttggatatatacccagagtgggattgctgcgtcatctgatagttttagttttttcaggcatctccacggtgttttccatcatggctaatttacattctaaccaacagtgtataagggtcctcttttcctcacagccttgccaacatgttattttttttgtttgttttttaataaaagccattcttacatgtatgaggtgatatctcattgtggtttaactttttgttgccctgaataatagtagtgatcctgagcaatttttcacagacctatagcaatttgtatgtgttctatcaagaaatggctgttcaagttttctgcccatttattatcagggttgtttggttttttgctgttaagttgtttgagttctatgttttgtcatttttgtttgtttttttttgtttgttttctagacagggtcttgctctgtcatccaggctggagtgcagtggtgcaatgacagttcactgcatcctccacctcctggacccaagcaatcctcctacctcagcctcccaagtagctgggactacaggcacatgccatcatgcccggctaatttttcttttcttttcttttctttttttttgagatggagtctccctctgtcacccaggctggagtgcagtggcgtgatctcggctcactgcaacctccgcctcccgggttcaagcgattctcctgcctcagcctccgagtagctgggattacaggcgcgtgccaccacgcccggctaattttttttttgtatttttagtagagacagggtttcaccctgttagccaggatggtctcgatctcctgacctcatgatccacttgcctcagcctcccaaagtgctgggattacaggtgtgagccacggtgcccggccaatgcccgactaatttttcaattttttgtagatatggggtctcaccatgttgcccaggctgatcttaaactcctgggctcaagcagtcctcccatctcggccttccaaagttctgggattacaggtgtgagccaccatgccaagccctattttggatattaaccccttatcagatatatggtttgaaatagtctctcccaatccataggctaccttttcattttgtttcctttgctgtgtgggagatttttagtttgatgtagtcccatttgcttatttttgcttttgtaggatgatctggtgtgatagctaaaaactcattgccaagggcgatgtgaaggagaattttccctatgtattctcccagtagttttacagtttctggtcttactttttatgtctttaatccattttgacttcatttttctttttttctttttcttctttttttttttgagaccaagtctcactctgtcacccaggctggagtgcagtggcacgatctcggctcactgcaacctccacctcccaggttcaagtgatttctcctccctcagcctcctcagtagctgagattacaggctcctgccaccacacctggctaatttttgtatttttagtagagacggagtttccccatgttggccaggcaggtcttaaactcctgacctcaggtgagccaccgcacctggcctcatttttctctatgaagtaaaataagggtccagttgcattcttctgcatgcaaatatccagttttcccaacagcatttatttaagagatcgtcctttccccattgtgtgatgttggcacctttgtcaaagatcagttgaccatgagtttggatttgtttctgagctctgttcttccattgtgtgtgttttcatgccagtattataaccgtaataggtccgttgccccatgagcacagcatgtcaatacagcaggttgcagcaaagaaagacggtttactgtaaggctgcagaacaaggaggtaggatgaaaatgaaatccgtcctcccagggagtttggagctagggtttttaagggttttaaagtgtggaaatcactgcttaaagagtgcagtgtggagtcatgagacaggaagatgaagaaactattctcatgctgattctgttcctctgtggttgtcttcagactgcttggcatcagctatttcactggaatttgggacctgagaaacatcttgtgcaattcttaaaagcctcatgattctaacgttagaaatcctatgtatgggaacagtggggactctgtctcaaaaaaaaaaaaaaaatttttttttaaaaatcttttcatattgttttccagtctgtattttatttattttttgctctaatctttattatttccttccttcctatctttagactccatttgttcattttctggttccttgaaatgtttgtttgagatcttccttctttcgtgatataagtatttactgctataaacttccggcttagaactgcctctcttgccttctttaagatttgaggatgttgtgtttacatttacgtttgtctcaaaatatttttacagtttcttccctggcccattggttgtttagcatcatgtcgattaatatccacatattttttgatttacctaaatttctcccgttattgatttccagttttatgcccttgtggttggaaaaggtcattcatatgatgtcagtcattgtaaatttcttaagatttgtatcatgtcctaacatgatctatcctggagaatgtttcctgtgtacttgagaagaatgtacatgctgccgctattagagagatggtgcagaatacaactgttaggtccatttggtctaaagcgtaattcaggtccaatgtttacttgttgattttctgtccgaatgatctttcctttgttgaaagtaggatttgaagtcctcttctgtcattgtattaaaatctaaccctcccttgagatttcttaatgtttgctttatgtatttaagagctccaatgctggatgcatacatatctataattaatatatcatcttgactgatggactaattttattatataatgacattctttgcctctctttacagtttttgatttaaagtctattttgtctttttttttttttttttttttttttgagttagagtctcgctgtatcacccatgctggaatgcattggcccgatcttggctcactgcaacttccgcctcccaagttcaagcgattctcctgcctcagcctcccgagtacctgggattacaggctcctgccaccacgccaggctaatttttgtgtttttagtagagatggggttttgccatgttggccatactggtctcaaactcctgacctcaagtgacctgcccaccttggcctcccaaagtgctaagattacaggcgtgagccaccatgcctggccgttaatctttttttttttttttctttttttttgagacagagtcttgctctgtcacccagtctggagtgcaaggtgcaatctcggcccaacctccgcctcccgggttcaagctcttctcctacctcagcctcctgagtagtgtgcaccactatgcctagctaattattgtattttttagtagagatggggtttcaccatgttggtcaggctggtgtcgaactcctgacttcgtgatccacccaccttggcctcccaaagtgctgggattacaggcttgagccactgcgcctggccaatcattttttaaaattaggactcccttaactttcactccttataacgggattaatgcaggccaactgcaaaaaaattcagtcctctaaggagttcataaagaagaatctcaaaattaattacccataattccatctagagataattactgttaatcatatttggtatatatgtttatagtcctccacttcccctctaaacatgtatgtgcttttgtttctggaacattaaatccttctaattgataaagtaaatgaatcaaagactttccaaatggtagtttgtgaaaggcatccagcccagccacgggtcacgttatacctgtgagcatgtggggatgggaggggtgtgccagtgatctttgtcttgttttggaaaacctctcatatatttacaccttataggagtagagacacatcatctgaaactaatcccatggcaacaaattatcaaaaaatatagtgcacccttggaatgagttctgcatctgtggattcagccacagatcaaaaatatccttgggaaaaaaaataggaggtttgcatcctattttacagatgctaacatctgtattgaacatgtacagacttttcttctcattattctaaaccatacagtatgaaaattattagcatagcatataagataatttataaagaatctagaatctaaaatgtacaggaggatgtggataggttatatgcagatactataccactttgtataagagtctgaagcattcgaggattttgatattcaggggggttctggaacaaatctggatactgagggatggctctacagcctttcagaattaaattttctatgattttaatggttctttcaaagaccatgacagtaatcactgacgcctgttgccttacaaatctgcttgtacaagtaacatttccatgattatatgtacaagtaaaaaatacccactatacaaataacaaatccaagatcagtgaaattgagtacgatgacaattaaaatggtttgcataaatgtcctataacacatggaacacatgattcatcctcttgctaatgttcccagtttggcatcttctaagatcatattatttgagcacaatttttgatgcagaatcatctctctgttcccctactcgcttgtgagagggaacatttcctccttatgtgtcttagaatatttttacctaacatgcttaaacaaaacaaatttcattcttaacatcaggctctgaaagttccttttagttagcatttgctatattgacagctggtttgacaagtacatattttagcataagaaaaaaacagcaggccgggtgcagtggcccttgcttgtaatcccagcactttgggaggccaaggaggcagattgcttgagctcaggagatcaaggccagcctgggcagcatagcaagaccccgtctctaccaaaaaaaaaagaaaaaaaattacaaaaactagccagatgtggtggcgtgcacctgtagtcccagctcttgggaggctaaggtgggaggatgacttgagcctaggaggcagaggttgcagtgtggttgagattgcactactgctctccagcctgggtgacaaagcgagaccctgtttcaaaaaaattaaaaacagcagatgagtttcttttttaaaactggattcaggatcagtgtaatgttactgatcttcaatagtaaccacaaacttaaaaaatctttacatattgccgtatgtattagatattctgatatttaatagctgagacagtcataccttatagtattattatcccaattttactagtgaggaaacaagcagttaataactgttagagctcagattcacattctgaaagttatagaaattaagaacatagagcctatgttcttaatttcaccaaaatatctcctcccaaattatacataccctttcaaacctaccttcctctcttagtaattaatgataccgtctttcaatttacatgaatcagtatcactattagtaaatgtattttatgccattatataacagactaatttatttattctgtactctactgtgatattttcctctatcttctgcaagattttcatttttaaaaattactgtcttggctgggtgcagtggctcatgcctgtaatcctggcctaggcaacaagagtgaaactccatctcaaaaaaaaaaaaaaaaaattagtgtcttgaaatttgcataacatcaatggatgatgtcattgtgaatgtcctggcggtgatattatactgtatactataatcaccaattggtgtaaccaggtgaaagatacataggctttctcagtattatgtgtacaactacctaagaatctacggttgtatcaatttaaaagaaaaactttcccacacaagataatctccaaacatcttgggcatacatgtgtgtactactctagctatttccttgggataaattctaaaaagtgggattttgagtcaaaatgagactgtggttaagtagtacctgcaacatcctgtagaccctgtgacattagtacttggaatgagagcgggactaactgggcataactgctgcctgtacattgtttacaatccagcaagcaagggacaccgaatagcacctcgggcagcctgtgctggcggcctgcagagaattccaggtgatgctccagaggggctaggagaggatacccttctgatgacagccatggctcacccggcatcaccccactcagaggccagacgggctcccagctggggtgacacagcccctctcccagccgggaacgggcgtctgcagggagcaagatggactcagtgtggggctgcctgcctggaacgcgccctgaggcccctgcctgggaccggcccagactacgtttcccagaggccccccaggaacttaaggcgctgcatgctgggacacggggcttggggctctggtttccccagacatcgccctcctcaagcctctcaccccttcccgaagcccctgtgtgtttgggcctgagtagggcattcgcttcctaggaggaacccaggggtgcgcgccaagcatgggggtagggggaccgccgagtgcgcctgtggcttcgggagaggccaaagaaggaaggagtgggaagggcgcgcacgcgtgtcagtgtgtgcatgtgtcagcgtctgtgcacgcgcacatgtgtgtcggggtctggtcgcacatgcggatcaaggtctggccacacgcatgcgttgggggtctgtgtgcgcgtacacgtgcatgtcgcggtctgggtgtacatgcgtgtcaggatctgtgtgcacgcacatgcgtgtcgggctctgctgctgcctgcgcgctccggccgctgggtgcgggaggcccctcccgagtccggggtgcgcatgcgcgctggcctccatgggtggcgggaccgactgtgtgacgcacttgcgtgggagtgcgaggctgacgcggcggctctatctcccgtaactgtgacacgggtgcacgcaagcgtcattgggggtgatgggggccgtgctcggtgcgcttctgcaccggtgacgcaaccgctgtgtctccgccagtccgcgcaggtgagattggcgcccatggctccaaggggagacgggcacggagcttctagcggtgacgcacttgctggagagggtgtggggtgacgcagccgggctctccccataactagggctggggtgctcccgaggctttggggcgacggaacccgcacctgtgaacctcggcagtgcgtccccgggactctgttctgtgaggtgcgctctgggggatatgtgggggcggcgatcaggacgggtctccgtggcccacggatgtgcctttgcactgtgtggagtggcggggccggcagcgtggccgtgctgggcgttagtgggtatgaggggcgcagatgtgtctcaggccagtgtgtgctgtggtgaggctgagccatcagtgcaggcttgtgctgggatggttggtcgggccttctgggtgacgcaggtgtgtgtgacagcacaacctgtagctccagcgtctctgtgctgagatgggtgatcgggccttctgggtgacgcaggtgtgtgtgacaacacaacctgtagctccagcttctgtgtgctgggatgggtgatcgggccttctgggtgacgcaggtgtgtgtgacagcacaacctgtagttccagcgtctctgtgctgagatgggtgatcgggccttctgggtgacgcaggtgtgtgtgacaacacaacctgtagctccagcttctctgtgctgggatggatgatcgggccttctgggtgacgcaggtgtgtgtgacagcacaacctgtagctccagcgtctctgctgcttcccctgccttcacctcctaaccaagcggtacctgcctgagaacaagggccgcggaaggacgggagtgcctgagccctgccaggaaattcaccaacaagaaggcagaaacagccatgaggtgacgctttcagagctagaagtgctctccactcagggcgcctgagtgacaggagacggtggcctcaggagtagaattcctcctgtagagggacacgtccctgatgtgggagacagggagaggggcagctccacgcttcatcatctcagttaccacagcgtgctcttcaggaatctcccagaaactccatctcggggcctcgtatttctcattggttttattaggtatggcaggtgttacccttctggttctgttttccccaggccagcatccttcagaaaaagcatccccgaggaggaagacgaatcgttaaacatcttaggtcaggtgagtatcttttttttttttttaattaaatcatatgtgtttatgagacttagtcggcgggcgcagtggctcacgcctgtaatcccagcactttgggaggccgaggtgggcaaatcacaaggtctggagatcgagaccatcctggctaacacggtgaaaccccgtctctactaaaaatacaaaaattagccgggagtggtggtgggcgcctgtagtcccagctactcgggaggctgaggcaggagaatggcgggaacccgggaggcggagcttgcagtgagccgagatcgcaccgcttcactccagcctgggcaacacagcgagactccatctcaaaaaaaaaaaaaaaaaaaaggaaatcctattgaattagacgttttgtaaatatcctatccaagatgacgactgattattcagtgaaggaagagaggagcctggtcacatttattaagcacatattctctgtactaaactgtctcttgtctattttgcacacacctcttaattcttgtcttagttgattcagtctgtgataacaaagtaccatagactgtgtgactaaaagggcaaactttttttttttaattttttttttttttagagacagggtctcactatgttacccaggctggtcttgatctcatgagctcaagctttcctcccaccttggcctcaaaaagtgcttggattacagatgtgagccaccatgttgggccttttttattgtttttgttttgttttgtttttgagacagggtcttactctgtcatcaaggctggagtgcggtggtgtgatcatagctcactgcaacctcagccccctgggctcaagcaatcttcccaccccagcctcccaagtagctggggctactggtgtgtgccaccacatgtggctgtatatttttatttttattttgagacggggtctcgctttgtcatccaggttggagtgcagtggcacaatcttggctcacttcaacctctgctttctgggctcaagcaatcctcccacctcagccttctgagtagctgggactacaggtgtgagccaccacacctggctcttttttttttttttttttttttttttttggtagatacaatgtttcaccatgttgcccaggctggtcgtgaactcctgagctcaagcaatctgctgcctgcctcggcctcccaaagtgctgggattacaggcgtgaggcgccacacccagccaattttttaatattttatagagacagggtcttgccatgttgcccaggctggtatcaaactcctgagctcaagcaatcctcccatttccacctcccaaagtgctggggttacaggcatcacccaccgtgtccggccacagcaagcatttatttcttacagttctgggggctggaagcctgagaccagggtgccagtgcaagcagcttccggtgaggccttcttcaaggttgcaggcgaccaccctcgtgccatggccacacatggtgaaagggagctgagagctctctgggatcgtttttataagacactaatcctattcctgagcactcctccctcatgtcctaatcaccttccaaaggcctcacgtcttaataccatcacattggggaacagaatttcaatataggaatctggggaggaataaaatacttagttttgtcaggtatcttcagaggctatttaggtacagtattgtgctcagggtcagtgtgtacaaaaccaactcatttttcttctctcacaccacaacgataatcaacacagaaaactttgtgacttggccgggtgcggtggcccacacttgtaatcccaggactttaggaggccgaggcggatagatcactttgaggccaggagtttgaaaccagcctggccagcatggcgtaaccctgtctctactaaaaatacaaaaattagctgggtgtggtggcgcatgcctgtaatcccagctactcaggaggctgaggcaggagaatcgcttgaacctgggaggctgtgaacctgtgatgagctgagatcacgccaccacactccagcctaggtgacagagcgagactctgtctcagaaaaaaataagctttgtgactaaatgtgtggggagaagcaagctgtagtggacatcagccggatgtcctgcagttcagttctgacaccatctacctggagatggcatcagattccacaggttgtgagcaagactgtcccactctgccccactagccacaagaccaggcctctgggacatcttgccaaccctctacaggttggggttcttatactctttggcttctattagtgtatttgattgactcagaattcagggaaacacatataccagtttattacaaaggatattttaaaggatactaatgaacagccagatgaagagatatgtaggactagggttggaagagtcccaagcacaggagcttctgttcccgtggaattggggtgcgccaccttttcagagttcttttgtaccttcctagcagccacctcctgttcagctgtccagaagctctcctcaccctgtcttcttaggccttttatggagacttcattggataggtgtgactgaagcatgcacgaatgtgttgaaacgtgattggacaaataagagttgatttaatgctaattgattgagtggggaaactcaaggcccgtctgttcagattcttcttggcctctcagtgcagcattccttcctacaggtacagggcaggaccctctctggagtgagagtcctgctttgggcaggtgaaaggagggcaagagaagatgagagagagattctgcttcccgaggcctgcttctgaggctgaaagtgccctaatattaagattttaccaagggttatggaattatgagccaggaaccatggacaagaacatacagacacactcataccccatatatacacacatataggcacctacatatatacacaccatacacacatatacacacacataccccatatatacacacatatacacacctatacacacctacatatatacacacacatacacaccatacacacatatacacataccatatacacaccatacacacatatacacacacataccccatatatacacacatatacatacctacatatagagacacatatatacacaccatacatatacaaacacaccccgtatacacacatatacacacctacatatagagacacatatatacacaccatacatacacacacaccccatgtacacacacatatacacacctacatatatacacaccatacatatacaaacacaccccatgtacacacctacatatagagacacatatatacacaccatacatacacacaccccatgtacacacacatatacacaactacatatatacataccatacgtatacaaacacaccccatgtacacacctacatatagagacacacacatatacacaccatacacacatatacacacacaccccatatatacacatacacacctacatatatacacacatacacatcgtacacacacaccatatatacatatatacacacatatatacacaccatacacacatgcacacaccatatatatgcatatatacacacctacatatatacacacatatacacacacgccatatatacacacatatacacacctacatatatacacacatatatacacattcatacatgtacatacacaccccatatatacacacatatacacacacatcccatatatacacagctacatatatacacacatataaaaaccatacacacatatacacaccccatatatacacagatatacacacctacatatatacacatatacaccatacgcacatgcacacacatacccatatatacatatatatatacacacacgtatatacatatatacacaccataacacacgtatatacatatatacatatacacatatacataccatacacacacgagcatatacacacacatgccatacacacacatatgtacacatacatacccacaccatacacacatacatacacaccacacacacacatatacaccccgtacacatatatacacacaccatatatacacacacatatacgcacacacaccccatacacatgcatacctcatatatacatatacacacctacatatacataccatacacacacatatatacacacatatacccacaccatacacacacatatatacacacaccatatatatacacacatatatacacatccacaccatatatacacacaccatacacacacatatatacacacaccatatatatacacacatatatacacatccacaccatatatacacacaccatgcacccacatatatacacacaccatatatatgcacatatatatatacacccacaccatatacacacacatacacatatataaacaccatatatatacagacacatatacacacccacagatagacacacatatacacaaacatacacacaattatatcacaaggtctgattgtattactgagacacagtgaaaggatgttccataacaggaaggttatgcctgattcagtgacactactttttcaatattaggccttatatcagtttatttttgctgttttaacaaattactgtagattattggcgtcatacaacacaaatgtattatcttactgtcatagaggtcagaagtctgaagtgggtctcaccgggctaaaaccaggttgttggaggctgtaggagatattctgtgtccttgcttttgctggcttctagacgccgcccacactccttagttcgtgaccccttcttccatcagcaaagcctgaaaagacaagtcctttttccgtcacaccactctgaccctcctcctctaagtttaaggactctggtcattacattgcgcttgcttctataactcaagagaatcttccgtatgttagaggcagccgattagccattttaagtccatctgcagccttaattttcctttgccatacaaggtaacatatttgaaagtactggaattaccatagagacacatttgagaggtgggcaaagtggcaagatcccacctctacaaaaatacaaaagttagccaggcgtggtaatgtgcaactgtggtcccagctactagggacgctgaggtgggaggatcacttgaacccaggagatcgaagctgcagtaagctgggttcacaccactgtactccagtggcgacagagtgagaccctgtcgcaaaatatatgtgcacacatacacacatttgagaggcaggcctatccattcagagtttccttaatgactacagtgtgcctgctcccccataactatgtttgtgtttggcattttcttttaatttgggactatctcagtaaatttcttatattataatgggattaatgcaggcctgctggccaaaaaaaaaaaaaaaaaacaaattagtccctgaggagctcttagagaaaactctctaaattacccgtaattgtgcgatccacaggtcattactgtttctggtcctcgtttttgtaattaatgtttctagtcctcctctttgcccttaagcaggtatgtgttttctttctggagctggaattttgctaattaatcatgtgactactccagagactctttaaatctagttttaaatctaatctgtagcagcaaattatcaagaaagcctttaaaattaaagattctaaggtggaatgattgcttgaggccaggagtttgagaccaacctgagcaacatagtgagacctcatctctccaaaaatttaaaaaattagccaggcatggtggtgtgtgcctatggtcctagctacttaggaagctgaagtgggaggatcccttcagcccaagaggttaaggctgcaatgagccgtgatcccaccactgccctccagcctgggtgaaagagtgagaccatctcaaaaaaaaactagaaggccgggtgcaatggcttgtgcctgtcatcccagctctttgggaggctgaggcaggtagatcacctgaggtcaggagttcgaaaccagcctggccaacatggtgaaacgccgtctctacaaaaaatacaaaaattaggcaggcgtggtggcgcgcgcctgtaatcccaggtacttgggaggctgaggcaggagaattgcttgaacctgggaggtggaggttgcagtgagccgagattgtgccacagcattccagcctggatggtagaacaagactctgtctcaaaaaataagataaaatagctagagattctagaattgtaatgtttctttcccagaacatgacagtaatcactgataaattctaagtaatcatcaggtgccttacaaatatggactttctgggtaacattagcaaggttatagatacaagtaacaaagactgtgtaagtaacatttgcaagataaaataatgaggtgataagatggcaatagttaaaaatgttcacatgtatcttccatttcacatagaacacaagattcacgccgggtgcagtggcttatgcctgtcaccccagcactttgggaggccaaagcgggtggatcacctgaggtcaggagttcgagaccagcctggctaacatggtgaaaccccatctctactaaaaatacaaaaactagccaagcatggtggcaagcgcctataatcccagcttcttgggaggctgaggtaggagaatcacttgaacctgggaggttgaggttgcagtgagccaagatcgctccactgtactccagcctgggcaacaagagcaaaatcccatctcaaaaagaaaaaaaaaaactccgggcactgtggctcatgcctgtaatcccaacactttggaaggccgaggtgggcagatcacgaagtcaggagttcgagaccatactggccaacatggtgaaaccccatctctactaaaaatacaaaaaatagccgggcatggtgacgcatgcctgtaatcccagctactcaggagactgaggcaggagaatcgcttgaactcgggaggcagaggttgcagtgagtcgagattgcgccactgcactccagcctcagcaacagagtgagactgtctcttaaaaaaacaaaaaacaaaaaaccagattcaccctcttgctaatgtttgcaagttggcatcttctcgaaataggttctgtaagctggctggattccacacccccccaccccccgtccccgagaaggagtcttgctatgtcatccaggctggagtgcaagggcgtgatctcagctcactgcaatctccgcctcccgggttcaagcgattctcctgcctcagcctcccaagaagctggtattacaggcttgtaccaccacactcagctaatttttgtatttttagtagagatggggtttcaccatgttgggcaggctggtcttgaactcctgacctcgtaatccacccacctcagcctcccaaagtactgggattacaggtgtgagccaccgcacccagccaagctggattttttaatgcagaatcatgtctcttttctctacttactggtggagaggcaacatttccctaaatgtgtcttagaatctttattgctagttttgctaatgaacagaatttcattcttcacacattaagctctgaaaattgtttttagtttgcattcattatattggcaactggcttgagaaatatattttaatgtaagtaaaaaaaaaagcagacttgattattttataaaatttgagatgtgtaatgttgatcttcaataataacagctaatttacattaaataattgttgtgtattactgcatgttgtagatagattatcttagttaatagttcatgcagtcataccttgtggtatttttattccagctttaccagtgaggaaaccgacactgtgaggttagtaatcatcagagctcaggtttgcatcctgaaagaccacagagctgccaggtgcggtggcaaaacccatctctactaaaaatacaaaaattagccgggcgtgggcgcgcacctgtagtcccagctactcaggaggctgaggcaggagaatggcttgaacccgggagggagaggttgcagtgacccgagatcacaccgttgcactccagcctggcgacagagcgagacttcatctcaaaaaaaaaaaaaaaaaaaaaaaagagcacagagcctgcattctttttttttttttttttttttgagacagagtctcactctgttgcccaggctgcaatacagtggctattcacaggtaccatcccactactgatcagcacaggagttttgactgcctctatttctgacctgggccagttcatccaagcctgtgtccttaatttcagcaaaacatctctgtccagattatacgtacctttttattttattttattttattttttttgagatggagtcttcccctgttgccaagactggagtacagtagtgcgatctcggctcactgcagcctctgcctcccgggtcccagcgattctcccgcctcagcctcccaagaagctgggattacaggcatgtgccaccatgcccggctaatttttgtgtttttagtagagacagggttttgctatgttggccaggctggttttggaactcctgacctcaagtgatccacccgccttggcctcccaaagcgctgggattacaggcatgagccactgtgcccggactatacataattttttaaatctaccttcttcccttggtaattcatcagaaattttttctcaattaatctgcatcaatatcattagtaaatgtattccatatcattatataacattatttatatatgtgttctctactatgagatatttcagttgttttcatttttaaacattatctgctggaaaatctggataagatccatgggttgttattgtcctggttgtgatattttactgttattttgcaaggtgtcacagttggcataaatcaggtcaagggtacaaaagaccactgtctagtatttcttataactacatgtgtatctacatttatctcagtttaaaagacaatctttcctagaaaaaactgattttttgaacattcttaggcatgcattcatatactactatagctatttccttgtcataaattccagaatgtggaatttttagtcaaaattagacatttgttcagtgcctgcaatatgccagatgctgtggctattcgtacttggaatgagagtctgattcagtggactcagctgctgcctgtacagtgtttataatccagcaagggaaactaaatagaagaagctcaaggcagcctgtggtcaaggccggtggagaattccaggtcacacactcagagaggtgccaggaaggggacatcattctgtggacagccactgataattcatgaccaggtgattctgaatatactgactctttgttgggataaatggaatttattttctaggctttataccttaggtaatttttttcctttttaaattttttgtagagatggggtcttgctatgttgcccaggctggtctcagactcctggcttcaagcagtcctcccactgtggccccacaaagcgcagtgttggcattacaagtgtgaaccactatgtctggccttttttgtcctttatccttttttatttttatttttttttctttttgagacagagtctcagtctgtcacccaggctggagtgcagtggcacgatctgggctcactggaaactccacctcctgggttcaagcaattcttgtgcctcagcttcccgagtagctgggattacaggcacgcaccaccacacctagctaatatttgtatttttctagtagggacggggtttcaccatgttggccaggctggtctcaaactcctgacctcaggtgatccgcccgcctcagcctcccaaagtgctgggattacaggagtgagccaccatggctaggagtagactttttaagaaaaaaaaagaaaccttctttgtctttggagagtctaattgcctctgactacatttcaaatcagtacacatttatatttgataagggaatgcatgccttttgttgcaacaaataggtgcactgaaatgaagacactcaagatcacggggtgtgtcaggagctgtcaggaccaccaccaggttccttgtttctctagatggactcaacaggactcaccatctagacctactcgtgaccgatttattccagtgaagggatacaaagcaaaaccagctgagggagaggttgcataggacaggttagcagggcaccaggctccctcttcctcagtcctctcccaggggcatcacaccggatgtgcctggctcatccagcatcacattgtgacaacacctgttccatgttatcgaccagggaagctcaccagagtctgctggtgcaaggtttggtttggtttggtttggttttgggtcagagttttgctctttcgtccaggctggagtgaagtggcatgatctcggctcgctgcaacctctgccccctgggtgcaagtgattctcctgcctcagcctcccaagtagctgggtttacaggcacccgccaccaggcccagctaatttttgtatggtagtgcaaggttttgatcagggttcatgcacacactgcctcgcacaatctgaatcttctggactcccggaggaaaccaagggttccgtgtaaaccacattgtttatactgattattccagcgaagggatacaaagcaaaatcagaagagggagaggttgcataggacaggttagcagggaaccaggctcagtttaggcacagcgagccactcttacacgtgaaagaagagtgagaacactcgggtgtggttttcagacgccatgggccagtgttgcgagcagcctaagcatggcagtttccagttcagtgtgttaactgttttgcataaggggtcgtagaacttcccggattttttctttctgtttctctgtttttatatctctattttatttatttttctactgatatcttagggttggtttgtcagcgtgtatggttctgcattccctccttccctctctcctcctctccctctctctccatatatatacatgtgtatgtgtatgtgtatatatagacagatgcgtgtgtgtgtgtatttttatatatggaattttacaaatgttattgtgtcattctgttttggtaacctaactttactgagagtatgtctgaaatatctctcatgtctttaaatatctttctaacttaacattcagtaatcatttactattttactttgatattctgtgtgtaattatgctgtcagcttttctggactcaaaagtgctctcagatgtcacctctggtatacaaaaaaaacagttctgtatattacctgagcagtttcttgtccacctgccatgttgtgagtaacatcacccaatctagaggccagaagaggcccaagtttggataatacagcccctgttcaccctggaagcttgtctggaggggccagggtaggctcagaatgagactgaatactctgagcacccactgtctgatcctagatcacaatccccccatccagagttagctaatctatgaggctcatgggtatggtctgcatagaagaccaccctcacttctgacaccactgcaagcttggtggggattcctcaaaccgccctcaggttcaacagttcactagagccaggcatggtgactcatgcctataatcccagcaccttgggaagctaaggtgggaagctcacttgaggccaggagttcaagaccagcctgggaaatatagtgagacgcaatctctacaaaaaaaaaaattagccaagtgcagtggtgcaacctgtaatcccacctactcgggaggctgaggtgggaggattgctcgagcccaggaagtcaaggctgcagtgagctgagattgtaccactgcactccagcctggatgagagtgagaccctgtcttaaaaaaaaaaaacaaaaaactattcactaaaaggacccacagaattcactgagagatgttatgctcatggttacagtttattacaaggaaaggatacagattgtcatcacccaaggaaagaagtacgtggccaggtgtggtggctcatgcctgtaatcccaacgctttgggaggacaaggagggcagatcacgaggtcgggagtttgagaccagcctggccaacatggtgaaaccccatctctactaaaaatacaaaaattagctggacatggtggcatgtgcctatagtcccagctactcaggaggctgaggagaatcgcttgaacccgggaggcagaggttgtggtaggccgagatcgtgccactgcactccagcctgggcaacagagtgagactccgttcaaaaaaaaaaaaaaaaagtacgtaagttgaagtccaggagggttccagacacagagcttctggtgtcttctccctgtggagtcaggactcattactctgctgtctttgatgtgtgacaacaggcaccaactatcgccaactagagaagctcaccagagctctgatgttggaagtttttattggggcctcagcatgtagacatgattgactggttggtggattaactgtctacatggttaatcttagtgtccaggtcagctgatactgcgtgaccaaaagctcctaccccgaatcccttgattagtatttctggcatagcaagcccccatcagaaacaaagacattcctcttagaggtaatatagattacctttcagcaccagagggcaaaggccagactactttttaggcaagtacacattctttactacatcccacccatccgtccccgacagggagctggccagaaatggagccctcctgttaaattgtctgggcctgtctttgaggcgcaaaaaaaaaaaaaagtaaagcctcctctgctgtgtgcagctaggtttcctgaggtttcattgagagcttggtttaggtttgatccatgatactcttttttttttttttttttttttttgagacagaatcttgctctgtcaccagaggctggagtgcagtgacgcaatctcagctcactgcaacctccgcctcccgggttcaagcgattcccctgcctcaacctcccaagtagctgggactacaggcacgtgccaccacatccggctaattttttgtatttttagtagaggcagggtttcaccgtgttagccaagatggtctcgatctcctaaccttgtgatccacccacctcggcctcccaaagtgctgggattacaggcgtgagccaccgcacctggcctgatccatgatactcttcacctttcccagatatgtcacggttatgtgtttgtgttgggaagccaagacagaggagccaaaaggtcatattacatcactatggggaccccagatgcacctcgttttaatctctttttttccacccctagctctagcctctcggaatttgtcttcttcagtggaaaccccgagaagactgatcagttcttcagttctaaaacaatggcccaggtaagtgtatatttctctttccttcttgagctatgatatttgcgttctgtgcatctgcttgtgaattatctgaagccttttatctagtcaagctctttataattacctgtttcccagctctttctattccagtgaatgataatgccacgtagctccgtgtctgcctttttgggaaatcactgagcaggtgattaagtatctcctgtttgctcccttttttggcaagggtaattttggagcagtgaagtagcaaagtcctttgagggaaatatttaagtcaagtctgtggtttgatgagttagatatgttggtcccatctgaccacatgagaaacagatcctccactgatcatgttttctgcgtagataagagggaatgctcatattcgccggtctgtcttagtatgtgctcagatcccaagctttatgggacttttggaaagggatggggctgtgattaggacctttgaacagaggtcatgttcctgccgggaaactggaggataaattttattattgaatggatctctcagaccacaagatgattctaagtcatctgacatccttatcctctaaatcagaaacagggggccgggtgtggtggctcacacctgtaatcccagcactttgggaggcccaggtgggtggatcacttgtggtcaggagttcaaaaccaacctgaccaacatggtaaaacctcatctgtactaaaaataccaaaattagcaggctatggtggcatgtgtccataatcccagctacttggtaggctgaggcaggagaattgcttgaacccaggagatggaggttgcagtgagccaagatcatgccactgcactccagcctgggcaacagagcaagactctgtctcaaaaaaaaaaaaaaaaaaaaatcaggaacgggggaaaggcagggttatggatggtaataaatatgaagatcttccagtatggaagtaggagatgatcacataccccagaatcggagaaagccttaggtgttttgggcaacctaagtgaataactgtaataaacagtctgacttacctgtgtgggaattttttaaatgcttaaaaggaagactgcttaaaatgtagtttggcatgatgaactggaggcttgaaaacattcaaacatgcaaaccgtattttctttttttttttcttgggacggagtttcactcttgttgcccaggctggagtgcagtggtgccatcttggctcacctcaacctctgcctcgcgggttcaagtaattctcctgcctcagcctcctgagtagctgggattacagggatgcgccgccacacccagctaattttgtattttaagtagagacgaggtttctgcatgttggtcaacctggtctcgaacccccaacctcaggtgatccgcctgcctcagcctcccaaagtgctgggattacaggcatgagccaccacacccagcaaaccctatcttcttttcttttcttttcttttctttttttttttgagacagagtctcgctctgtcgcccaggctggagtgcagtgccacaatctccgctcactgcaagctctgaccaccccgggttcatgccattctcctgcctcagcctcccgagtagctgggactacaggcgcccaccatcacgcccggctaatttttttgtatttttagtagagatggggtttcaccatgtttgccaggatggtctcgatctcctgacctcgtgatccgcctgccttgttctcgtgatccgcctgccttggcctcccaaagtgttgggattacaggcgtgagccccccgcccagccccagcaaaccctattttctaaaataaaagttcttaaacagaaatcttgatttttcttccccccttaaaagaaaaaatgctgtaggaatccacacttgttgagaacttataaggcaggcacgtagcagacactgcttgtaagcaagaagaaaacttggattgttttatccacttcctggcaggtttgactaactgaggattctgcacagtaaagtcattttctctgcagcggtagagctcttcagtgacatgcaggcattctgcttccgtcacagttacagtgatgtccttaccgccccttgccgatgtcacgggtgttcagtctgctcacggtgttcaccctacccagagggtggcctcctgtctccttcatctggaagctgtttcctttcatttcatcatgcacgtgtgggtttctgtttcagggtttggtgacgttcgccgacgtagccatagacttttctcaggaggagtgggcctgtctgaactctgctcagagggacctgtactgggacgtgatgctggagaactacagtaacttggtctcactgggtgagttgcacgcctcagataacttagactgcctcctggaatatccgctctcccctgtgaatttcaggaccgcctttcaagaaactagttgaatttcttcttcctgtccccaaggaatgtattgagccttattgatgtggccgtgagcaccacaaccttcccctcccatccatcggttaccttcccacctttgtcgactcccccgtaatcatctcacttccttaatgtccgtggaatgagtgggaattctgggatatttatttcatgaccatcttcaaaggagccagtttgtcctgtgagagtatgtttatacccaaattgctattggtggtcggtgttactctagggacccacgtctagggaaaacatgtggacacagtgccctgaattgttctagtaaaccagcctatgtgtttgaagtacagtagatcagacaaacagaatttgtgtaaaaccaaagtgggcgtatttcatttcttacataccatacctgaagtgaggttgaaagttacaatccccgaactgtgagttaaacattgaatgacaatatcttgcaaacatccctggaaacttatttttcttctagcaaaaataacaacaatgatattaatggctaagctgtctgtggtgaccctgcctgtaatcccagctactcgggagactgaggcaggaggatcacttgagcccaggagttgaaggctatagttagctatgatcataccactgtactccaggctgggtaacagatcaagaccccatcgctaaaacaataaacaaataggaatatatatattttatatatatacacacacatatatattatatatacacacacatatatattatatatacacatatatattatatatacacatatatattatatatacacatatatacatatacaatatatacatatatagtatatattatatatataaactgcttactgtgtgccatgcactgtgctaagcactgtgtgtgtaagtacattgcatttcgttctcacaggcagatgagacaggcacaatcattgtctattttggagatgaggatactgaaacacagtgatgcagtcagacggagggagcaggagctagaatcagatttaacagttttggtccccagattccttgctgccagccaccatgttccacttgcctccaggcataatgcctacagaaatttaaaatatgaccttttctcggccaggcgcagtggctcacgcctgtaatcccagcactttgggaggctgaggtgggcggatcactggaggtcaggagttagagaccagcctggccaacatggtgaaaccctgtctctactaaaaatataaaaattagccgggcatggtggcgcacgcctgtgatctcagctactccggaggctggtgcaggagaatcatttgaacctgggaagcagaggttgcagtgagccaagatcacgctactgtgctgcagcctgggcaacaaagcgagactctgtctcaaaaataataaaaaataaggccgggtgcggtggctcactcctgtgatcacaagactggcaggccaaggcagacggatcacgaagataggagttcgagaccagcttggccaacagagtgaaaccccatctctcctgaaaatacaaaaatttgccgggtgtggtggcgcatgcctgtaattccagctacttgggaggctgaggcaggagaatcacttgaacccgggaggtagaggtatagcatttctttttttttttaagttgagatttttttctttttttcactctgttactcaggctggagtgcagtggcgcgatcacagctcacagcagcctcaacctcctgggctcaagcaatcttcctgcctcatctccctgagtagcagggaccacaggtgcacaccacgacacccggctaattgttgtgttttttcttagagatgggatttcgccatgttgtccaagctgatcttgaactcctgggctaaaggaatccacccacctcagccttccaaagaggctggattacaggcgtgagccactgcacctggctcaatagcattttgacttctggttgttataaatttgattaatactcaatcaaaaaaaatttaaggccaggcatggtggttcacgcctataatcccagcactttgggagtccaaggcgggcagatcacctgaagtcaggacttcaagaccagcctggccaacatggtgaaaacccgtctctactaaaaacacaaaaattagccggtgtgctggtgtgcgcctgtaatcccagctacccaggagactgagtgaggcaggagaattgctgggacctgggaggcagaggctgcagtgagtcaagatcatgccactgcactccagcctgggcaacagagcaagactccctctcaaaaaataaaaataatttttaaagaatttttgaagttttgagcttgaaatttttcctcaagttctatgtcctctagcatttcgtttttttaaaggagggcatataatttctaagccagaggtactgtcttatagaattaagggaaagagccttgatggttgtgagggaagagacaagacaacaatacggaggaaagtgggagccagtcagccacccgtacaaagagcatccccacagggcagggaacaggcacaccctgaggtgttggagagctttctccaagagctcaggcccaaagcctctaggaaagaaagatcttaccacgaacttgatcttcaccccatttccctgtcaccttgtttttcctgtcatatttaaccccattttatgtgctgctggtgctgctggtctgtgggccacgcctttagtagcgggtagaggtgacagggtcctctgccctttatcattcctgaaagtgggttagcctcgctttaagtgcccgttttctttttctcatatctaggtgttggcagtactgcttcccgggtgttgttaatgtgtcaccaccatgaagcacctggtgtctggttgtagctcctctttgccattggcagtcattggcactgcttacattcatcacactgggggctcaaatggtgcgcgcctatcactgccccttcatttatcagctgttataatttaaagagaaactttgtttcatctgctaattgctcatgcagtggcactgttcatattggataagaaggataaaaactttgttctttttctttgtcagtttttatgttgtatttttttcttttcttttttttttttttttttgaggcagggtcttactctgattcccaggctggagtgcagtagtgcagtctgggctcactgcagccttgacttccgggctcaagccatcctcccacctcagcctcccaagtagctgggactataggtgtacaccaccacacctggctaatttttgtattttttttgtagagacagggttttgctatgtttcccaggctggttttgaactcctgagctcaagtaatccacccacctcggtctcccaaagtgctgggattacaggcgtgagccactgcacctagccaattgccagtttttataataaaggtctggtttcctagcgtgttccagagctggccatttaacattttgtagtatcattatgaacttatagatttaaacgtttgctgtttctcagtcctttgcagttagcctccttattgatgctcaagttctaaacttttccttattgttcttctaaactttttcacattttttattaaatttagtctcgtaaattatcttttttgttgcttttgaatgttgtattcttttacccagttgcttttttttttttttttttttttgagacggagtcttattcagtcggctcactgcaacctccacctcccgggttcaagcgattctcctgcctcagcctcccaagtagctgggattataggctcacaccaccatgcctggctaatttttgcgtttttagtacagacagggtttgtttgtttttgttttttgttttttgtttttttgatatggagtctagctctgtcacccaggctggagtgcagtggcacaatctcggctcaccgcaacttctgcctcccgggttcaagcgattctcctgcctcagcctccggagtagctgggattacaggcacccaccaccatgcccagctaatgtttgtatttttagtagagacaggatttcaccgtgttggccaggctggtctcgaactcctgacttcatgatctgcccacctcggcctcccaaagtgctgggattacaagcgtgagccaccgtgcccagtctgtttttttgtttttgttttgagacagagtttcatgcttgttgcccaggctacagtgcaatggcatgatctcggctcactgcaacctctgcttcccaggttcaagcaatttccctgcctcagcctcccgagtagctgggattacagtcatgcgccaccatgtccggctaattttgtatttttagtagagacaaggtttctccatgttggtcaagctggtctcggactcccgacctcaggtgatctgcctgccttggcctcccaaagtgctgggattacaggcgtgatgagccaccactcccggccctttaccagttacttttaataatactactgacatatacgtgtatcagtttcagaatgctttacacacagccatccaactgcatattgttttgttacagtacttctatatttggttttccaagtatatcatcacatcatctacaaatacttgttttcatcttcaaaataggaaataataggactaattgtcgggacctttttcatgtctgactttaaaatagatgtctccaatgaattctcagttagtattgtaccagaagtagaatctacattttaacaagagccctgggtgattcacatttattctactggataatttttatttctattagacgagtttttggtttgtggttaggttcgtttgtacttgtgtccctctaaaggaaagaaaatatgttcttttttcccagatttggagtcagcatatgaaaataagagtttacctacagaaaaaaacattcatgaaataagggcttccaaaaggaattcagatagaagaagtaaatcccttggccgtaactggatatgtgaaggtacgcttgaaagaccacagcgctccagagggaggtatgtcaatcagatgatcatcaattatgtcaaaagacctgctactagagaaggcacccctcctagaacacatcagagacatcataaggagaattcctttgaatgtaaggactgtgggaaggcctttagtcgtggctatcaacttagtcaacatcagaaaatccatactggtgagaaaccttatgaatgtaaagaatgtaagaaggccttccgttggggcaatcagcttactcaacatcaaaaaattcatactggggagaagccctacgaatgtaaagactgtgggaaggcttttcgatggggctcaagcctcgttattcataagaggattcatactggtgaaaaaccctatgaatgtaaagactgtggaaaggcctttcggcgtggtgatgagctcactcagcaccagagattccacactggggagaaagactacgaatgcaaagactgtgggaagacctttagccgtgtgtataaacttattcagcacaagagaattcatagtggggagaagccttacgagtgtaaagactgtgggaaggcttttatttgtggttcaagcctcattcagcataaaagaattcacacaggtgagaaaccctatgaatgtcaagaatgtgggaaggcctttactcgagtcaattaccttactcagcatcagaagatccacaccggtgagaagcctcacgaatgtaaggagtgtgggaaggcctttcgctggggttcgagcctcgttaagcacgagaggatacatacgggcgagaagccgtacaagtgcacagaatgtgggaaggccttcaattgtggctatcacctcactcagcacgagagaatccacacaggcgaaaccccgtataaatgtaaggagtgtgggaaggctttcatttatggatcgagcctcgtgaaacatgagagaattcataccggggtgaaaccctatgggtgtacagaatgtgggaagagctttagtcacggccatcagcttacacaacatcagaaaacgcacagtggggcgaaatcctacgaatgtaaggagtgcgggaaggcatgtaaccacctaaaccatctccgagaacatcagaggatccacaacagttgaagagccttttgaacgcagtagcccgctcgtatctatggtttcgctttccacagtttgttacctgcagtcaactgcagttcaaaaatattaaatggaaaattccagaaataaagaattttaagtctcaaatggtgtgcccttctgagtagcgtgatgaaatctctcgctgtccggctccagccggccggggatgtgagtcatcccttggtccagcacatccacgctgtatacgccacccaccctgctagtgacttagtagccgtcttggtgatcagatcaactatcccagcatcacagtgcctgtgcccaagcagtcctcactttgcttaacagtggccccagagagcaggagtagtgatgctggtgattcggatatgccaaagagaagccacaaagtgcttccttttaaatgaaaaggtgaaagttctcaacttaaaaaagaaaagaaaaaaatcatatactgaggttgctaagatctacatgacaataagatattttgggagagagatacgttcacataattttattacatatattgttacaattgttctattttgttagttactgttggtaatctcttactgtgcctaatttataaattaaactttagatatgtatgtacaggaaaaaatgtagtatatagtatcgtatatatgtacaggaaaaaaacgtactatctgtggtttcaggtgtccactgcgggtcttcaaacgtacccccctcaggtgagaggggactgctgtacaaagaatataggaaggcctctagactacatccattccttcctcaacaggaggaaaattcctggtacagtttaacgtaaggcttcactgatcactgttgtttttgtttttgtttttgtttttttgagacagagtctcactcttgcccaggctggagtgcagtggcacggtcttggctcactgcaacctccacctcccaggttccagcaattctcctgcctcagcctccccagtagctgggattacagacatgcaccaccacacctggctaatttttgtatttttagtagagacagttttcaccatgttgtccaggctggtctcaactcctgacctcaggtgatccacccaccttgccctcccaaagtgctaggattacaggcgtgagccactgcacctagcccactgatcactcttctgcttacagaatatcagaagtcattctagaggcaaatttgaagagtggaaaaatcactttttctgaatgatcttgtttttggtgtagatgtttttattgtgtgggttagtttaatgaatacataaagactaccagtaccattctgtctttactccgtggcatctgtggaataaccctgctaatgtaacacgtgagaaagcctttggtcatgccacccactctaccagttgtccccaccatcccccgccctcctccctgtgagacactgggccaaaggctcactacccctgtgcgttgtccagcacacagacactatgtgcattatttgtacataaggataatcacatctacctgagactgctatcatggaaattaaatgtttggtacatgtaaagtctttgaaagtgtaactggaatattgtgtaattttaataaataataactattgttgtttttatgatcattactaccatttgtgttgccattagtgaatttttacaagaaaactccctgtgggtgcaatgagtctggaaaagaccattgagtcttctagaagaaaacattaagagattattggcacagccgtgggttacgcaatgatttcttagtacacaaaacacagcaaacataaaaagttgttacacttcatcaaaagtacaaagttctgttcatcaaatgatgctgttaagatagggaaaagacaagaaacaggactggaagaagatgtttgctctaaggtacacctgacaaaggaactctcatagaaaatataaagaatccctcaagttgaaaaaaaaatcaatttaaaggggagaaaacttcagcacgtctcaacagaagaccaccaaatggccaataagtaagtgaaaatgtattcaatgtcattgctcctcaaggaactgtagagtaaaaccacaatgtgctgtcactctagacagtcaccaggatgattaaatttaaatcacaataacaaggctgatttcagatgtctcaccacaaagaaggaggataagggagcgaggtgatggatatgttaattagcttgatttaatccttccacattgtatacatgtatcagaacatcacattgtactccatcaatataatacaattattatttgtcaatcaaatattaataaaatcaaagatgagcaggtctctttgttggatattcaaacacgacctattcaagaaggaaccccgccagcagactggacctctgctaaaccctagcggtgcccacagcagggacagcgcgggagggaggtgagcggactggtcctggggacggggtcagggcccagagtagagttgttacaggaaaggggtgccaatccagaccccaggagagagttcttggatctcacacaagaaagaattcaggacaagtcctcagtgcaaagcaaaagcaactttattaagaaagtaaagtggtgggaccaggtgcggtggctcacgcctgtaatcccagcactttgggaggccgaggtgggtagatcacctgaggtcgggagttcaagaccagcctggccaacatggcaagaccccatctctactataaatacaaaattagccaggtgtgtgggcacacatctgcagtccagctactcgagaggctgagccaggagaatcacttgaacccgggaggcagaggttgcagtgagctgagatcacaccactgcactccagcctgggcgacagagggaggctccatctcaaaaacagaaaaagtggcgaaaggacagctactccacagacagtgttggacgctcctgacgttaggaggaacgcatccaccctaggtccaatgctcacatatatggggagacgtgctctgctacaagggtttgtgatgaaggattcattctcttcattattttgcaagaattgatattatctttaaagcaaaactaggaatgcctttgttctccagatatcaggatatctggacactcccaagtgtgggtctgtttagtaactgttaataatttgttcccttaaccgtaaacatctggaggctcggaattgcctacatttctcagaatgcagcccagcaagtctcagcctcattttcctagcccgcactcaaaatggagtcgctctggttcaaacacctctgacagagtcctgggggaggtgcggacacagactcaggggagagacctgaactatcttaagatggtcctaggctgagggtaggattaccttagggaaaggaccagagcccatagtaggaatcggagaatatggattggggaggactctagaccccatgggagtgagtttgacggggcagaggagtggctaatgggcatgggagggcctggctagagctcagggatgaattctgggagagaagggatagaggcctggagagaggccttggggctgggagaggactggagtgctcctgagagcagctgcggagatggagggcggacgctacatcctgcaggagagccttaggcacgggggatggtggtgtggttagagctcaggggtgtcctataaaggttggcaaaggatccagaatatagggttgaagtcctgcttgtttgatttacctcaagggtagggttacgtttcaatcaaagctgcttagttctcggattacaaatacctcagcattaggttaaggattcagattctccaggggtggtggggaagtgagggagcatgtttggggaaggggttccagacccaggtttcagagctgggtatctttctggtctaggcttcagtacccttaggaatcaacctcataggcggcaccgtcctgcttagtgcccctttcccctgtggaccctacgccagcctcagcagaaggggcccagggtcccttccttgccaccaagagcaacacgcatggtggggccactgctcttcccagcattcccgcataaacagaggaggagctgggtggggtaaggagaagggcaggggaaggagtgtgaagaggagaagcaggtggaagacagtgagaggaggctggaggaatgtgggagtaggggtagggagaatactgagaaacgaggaggctgtgcagaaaggcagcactggcctggccttacaggacacagccaaggcacaggaagacagcctgggtggacagggttagttcccagaaggaaatatgggaagaatgtgtgtcaggcaggactcttggctcaaggagcaaaatccaaagtttatataaaaagcccagaggtgggccaacgcggtggctcacgcctgtaatctcagcacttcgggaggctgaggcgagtggatcacttgaggtcgggagtttgagaccagcctggccaacacagtgaaaacctgtctctactaaaaatgcaaaaattagcccggcacaatggtgcacacctgcaatctcagctactcgggaggctgaggcaggagaatcacttgaaccgggcaggcggaggttgcggtgagctgagatccagccagtgcacttttttgagacagagcaagactccatctcaaaaaaaaaaaaaaaaaaaaatcccggaggtggccaggcgcagtggcccatgcctgtaatcccagcactttgggaggcctaggcaggcagatcaactgaggtcagcagttaaaaaccagcatggccaacttagtgaaaccctgtctctactaaaaatacaaaaattagccaggcgtggtgacccacgcctgtaatcccagctactcaggaggctgaggcaggagaatggcttgaacccaggaggctacggtgagctgagatcgcctcgctgcactccaacctgagctacagagtggctaatttttgtatttttagtggagacggtacagtggttcatgcctatactcctagtactttaggaagccgaggtgggcagatcacctgaggtcaggagttcaagaccagcatggccaacatggtgaaactccgtctccactaaaaatacaaaaattagccaggtgtgatagcgcatgcctgtaatctcagctactcaggaggctgagacaggagaatcgctggaacccaggaggcagaggttgcagtgagccaatatcgctccactgcactccagcctagccggcagagcaagactccgtctcataaaaaaaaaaaaataataataataataaagtttaccctagcttgggcaacatagtgggattctgtctctacaaaaaataaaaatattagccaggtgtggtggtgctcacttgtagtcccaactactcaagaggctgaggcaggaggattgcttgagcccaggaggtggaggctacagtgagtgatgattgcatcactggattccagcctggataatgacaaaaaaacaaacaaaacaaacaaaaaccctacaaagagcagtaacaacaacaacaaaaaaaaaacagggcgggtacagtggctcacacctgtaatcctagcacttggggaggctgaggtggacggatcacctcaggtcaggagtttgagaccagcctgaccaacatggtgaaaccccgtctctactaaaaatacaaaaattagccgggcaaggtggcgcatgcctgtgatcccagctactcaagaggctaaggcaggagaatcgcttgaactcaggaggcggaggttgctgtgagccgagggtgtaccacttcactccagcccgggcgacagagtgagactctctcaaaaaaaaaaaaaaaaaaaactacaaagagcagtaaaagccatggggtaaagggtaaccatgaagtcaaagagctttactaaagtaagtcattattgagccgggcttggtggcttacgcctgtaatcccagcactttgcggggctgaggcaggcagatcacctgaagtctggagttcaagaccaaccaggccaacatggggaaacctcatctctattaaaaatacaaaattagctgggtgtggtggcagatgcctgtaatcccagctacttgggaggctgaggcaggagaattgcttgaatccgggaggcggaggttgcagtgaaccgagaatacgccccattgcactccagcctggacaacaagagtgaaactctgtctcaaaaaaaaaaaaaaaaaaggaggtacatgagttgtacgcaaaagctacaaaacagttgaagttgtagaataatttttttaaaaaacctaaataaatggaagggtttttttttgtttttgagacggagtctcactctgtcgcccaggctggagtgcagtggtgcactctcagttcaccgcaacctccacctccccggttcaagagactcctgccttagcctcctgagtagctgggactacaggcacctgccaccatgcccagctaatttttgtatttttagtagagccagggtttcgccatgttgaccaggctggtcttgaactcctgacctcaggtgattcacccgccttggcctcccaaagtgctgggaatgaaaggatatttcatggtcctgaattggaagatttaatattgttaagatgatggctgggcacggtggctcatgcttgtaatcctagcacttggggaggctgagggaggaggtttgcttgagcccaggagttccagaccagccttggcaacatggcaagatcccatctctgtattatttttttaaataaaatttcaaagataacaatattacccaaagcaatatatacatattcaatgcaatatcaataaaatactcaatgacaattttttgcagaaatggagaaaccaactcttagagttgtatggaatttcaagacaccccaaatagccaaaataaagaacagtggaggactcacacttctggatttcaatttttttttttttttgagacggagtctcactctgtcacccaggttggagtgcagtggcatgatctcggctcaccacaacctccacttcccaggttcaagcaattctcctgctcagcctcccgagtagctgggattacaggtgcccaccaccatgcctggctaatttttgtatttttagtagagatggggttttgctatgttggccaggctggtctcaaactcctgacctcggatgatctacctgcctcggcctcccaaagtgctgggattacagatggagccactgcacccggcctggatttcaaaaaaattttaaaaagcaatagtaattaaaacagtgtggtatacgataatggcaaaaggatatacatacatggctggcgtggtgttgtgcacctgtaattccagctactcaggaggctgaggcaggagaatcgcttgaacccaggaggtgaaggttgcaatgagccgagattgtgccactacagtccagcctgtgcaacagagtgactttctgtctccaaaaaaaatttttttacttaaaaaaattacataaatattatatgtataatatctaaaaaacaaaatacaaaaatagccagatgtggtggcacccacctgtagtcccagctactcaggaggctgaggcgggaggatcacctgagcccatgagcccaggaggtcgaggctgcagtgagctgtaattgcgccactgcactccagcctgggcaacagagtgagaccctgtctctaaaataaataaataggccgggcgcggtggctcacgcctgtaatcccagcattttgggaggctgaggcagggggatcatgaggtcaggagatcgagaccatcctggctgacactgaaaccccgtctctactaaaaatacaaaaaaaaaaaaaaattaggtgggcatggtggcgggcacctgtagtcccagctactcgggaggctgagacaggagaatggtgtgaacccaggaggcagagcttgcagtgagccgagatcacgccagtgcactccagcctgggtgatagagtgagactccatctcaaaaaaaataaaaaataaataaataaatacaagctagaagggttttgaatgttcacaatacaaataataaatgtttgaggtgatggatatgctaattaccctgatttgatcattacacattgtgtacagaaatcaaattatcactccatatcccataaacacatgtaattattatgtgtaaaataagaaataaagaatttatgagaaattatttgctacagagcagacatcattgtctggagaggcagtaattacacaaagttatagaagccgaggagcaattgggaaggttctgatctcttttaggcacctgtggctgagtgaaactcatcaccaaaacaagccccatctgaacccatgcacgcagcaagatcaacagaataactctgcgcacatttcacaggctctttggacaaatgtatggggtgtcctcacctgagtttgcactaaacctggagtcatttatttcacaagttttcacaacaccaagggtcagcaaactctctgttaagggccggttagtaaatattttactagacacatattttgcagggcgcatatgttctctgtcatgtagtcctctttatttttacaagctttaaaaaatgtgaaaactggtagggtatggtgagtcacgcttgtaatcctagcattttgggaggccaaggcgggagaatctcttgagttcaagagactagcatgggcagcattgagagacctcatctctacaaaaaatggaaaacttagaagggggtgatggcgctcacctgtagtctcagctactcaagaggctcaggtgggaggatcccttgagcctgagaggtcaaggctgcagtgagctgtgatttcagaactgcactccagcctgggagtcagagtaagaccctgtctcaaaaaaaataaaaagaaaaagaaaagaaaaaaagaaaaatgtgaaaaccactcttacccctagaatgtacaaaaagatcctggaacagtggtgcacacctgtaatcccagcactttagaagccaaggcaggacgccccgtccgggagggaggtgggggggtcagccccccgccaggccagccgccccgtccgggaggtgaggggcgcctctgcccggccgcccctactgggaagtgaggagcccctctgcccggccaccaccccgtctgggaggtgtacccaacagctcattgagaacgggccatgatgacaatggcggttttgtggaatagaaaggggggaaaggtggggaaaagattgagaaatcggatggttgccgtgtctgtgtagaaagaagtagacatgggagactttttattttgttctgtactaagaaaaattcttatcctgttgatctgtgaccttacccccaaccccgtgctctctgaaacatgtgctgtgtccactcagggttaaatggattaagggcggtgcaaggtgtgctttgttgaacagatgcttgaaggcagcatgctcgttaagagtcatcaccactccctaatctcaggtacccagggacacaaacactgcggaaggccgcagggtcctctgcctaggaaagccagagacctttgttcacttgtttatctgctgaccttccctccactattgtcctatgaccctgccaaatcctcctctgcgagaaacacccaagagtgatcaataaaaaaaaaaaaaaaattaaaaaaacaaaacaaaacaaaacaaaaaaaagaagccaaggcaggagaatcactagaggacaggagtttgagaccagcctgggcaacagagcaagactctggcctgggtgcagtggctcatgcctgtaatcccagcactttgggaggccgaggtgggcggatcacctgaggtcgggagtttgagaccagcctgaccaacatgacgaaaccccgtctctattaaaaatataaaaattagccagtcgtggtggcgggtgcctgtaatcccagccactcaggaggctggggcaggagaattgcttgaaccagagaggcagaggttgcagtgagctgagatcgcaccactgcacttcagcctgggagaaagagtgagactcccagttaccggggaggctgaggcaagagaattgcttgaacctgggaagcagaggttgcagtgaactgaactaggaaagaaaaaaaaaagatggggttttgctatgtttcccaggctgctcttggactcctgggctcaagtgattctcccacactggcctcctgacctcaggtgatccgcccaccttggcctcccagagtgctgggattacaggcttgagccactgtacccagccccctccaggatttttacagttggacatctcacatttaaatctttagtcttgagtcaatttttcaatatggtgaaaggtaggagtccagtttcattcttttttcttttttttttttttttttttttttagaaaatcctaggccaggtgcagtggctcacacctgtaatcccagcactttgggaggcccaggtgggtggatcacttgaggttaggagttcgagaccagactggccaacatggtgaaaccctgtctctactaaaaatacaaaaattagtcggttgtggtgatgggcacctgtaatcacagctactcaggaggctgaggcaggggaattgcttgaacccaggaggcagaggctgcagtgagctgagactgcgccactgcactccagcctcggtgacagagggagaccctgtctcaaaaagaaaagaaaatcccgttaattattctaccaaaaagacatgtgtactcatatgttgattgcagcgctatgagtgctgacagtctcactctgtcatccaggctggagtacagtggcgtgatcttggctcactgcagcctctgcccaccagactcaagcaatcctcccacctcagcctcccgagtatctgggactgcagacacgtaacaccactctcagttaatttttctttaatttttgcagagacagggtctggccatgttgcccaggtcagttttttttttttttttttttttttgaggcagagtttcactcttgttacccaggctggagtgcagtggcgcgatctcggctcaccgcaacctccgcctcctggtttcaagcaattctcttgcctcagcctcctgagtagctgggattacaggcatgtgccacgacgcctggctaatttttgtatttttagtagagacagagtttcaccatgttggtcaggctggtctcaaactcccgatctcaggtgatccgcccatctcggcctcccaaagtgctgggattacaggcatgagccaccgtgcccagcccgcccaggtcagttttgaactcttggactgaaagtatctcatcttgccctctgaaagtgctgggattacagacatgagccacactacaccctgcccagtgtcaaccttctgcatatggctagccggttatcccagtggcatttattgaataggaagtcctttccccattgcttgtttttgtcagttttgttggccatcagaaggttgtaggtgtgtggcttcatttctgggttctccatgctgttccattactctatgtgcctctttatttttattttattttattttatttttttgagagacagtctcaccctgtcacccaggctggagtgcaatggcgcaatatcagctcactgtaacctctgcctcccgggttcaagcaattctcctgcctcagcctgccaaatagctgggattacaggcatgcaccatcacgcccaggtaatttttgtgcttttagtagagatggggtttcaccatgttggccaggctggtctgaaactcctgacctccaatgatctgcccactttggcctcccaaagtgctgggatcacaggcgtgagccactgtgcctggcctatgtgtctttttgtaccagtaacatggtgttttggttactgtatacttcttttgttttacatttactggcttattataaaggacattacaaaggacacagacgaagagatgcataggacgaggtatgggagaaggggtgaggagtttccgcgccctccctcggcacactaccctccaggaggcatccaagtcttcagctatcaggaagctcctagttactgtttccttgtacagtttgaagctggaatgtcatgcctccagttttgttcttttggcttaagattgctttggccattgggctcattttaggctccatatgacttttacaatagtttttttttttttttttttgggacagtctcactctgtcacccaggccggagtgcagtggcgtaatgtcagtttactgcaacctctgcctcccaggttcaggcaattcccctgccttaggctctcgagtagctgagattacaagcacgtaccaccacacctggctaatttttgtatttttagtggagaaggggtttcgccacgttggctacgctggtctcaaactcctggcctaaggtgatccgcccgcctcggcctcccaaagtgctgggattacaggcatgagccaccgcgcctggcctacaatcattttttataattctgtgaaaaataatattggtagtttgatgattctagattgctttgggtaatatggccacttaaaaattattttaattattaaaattgggggtacatagtaggtgtatgtatttacgggttacatgaaatattttgaaacagacacacaatgtacaataatcacatcagtgtaatgggatattcatcacctcaagcatttatcctaatatggccttttgttttggagatggagtctcactctgtcgcccaggctggagtgcaagggcacgatctcagctcactgcaacctccgcctcccaggttcaagtgattctcctgcctcagcctcccaagtagctgggattacaggcgcctgctaccacgcccggctaatttttgtatttttagtagagacaaggtttcaccatgttggtcaggctggtctccaactcctgatctcgtgatccacccgcctcggcctcccaaagtgctgggattacaggcgtgagccaccttgcctggcaatgtggtctttttaacaatattgattctgccaatccatgagcaaggaaagttttttcatttgtttgtgtcaaggatttctttcagcagtgttttgtttgttttttgagacagagtctcactatgtcacccaggctggagtgcagtggtgcaatctcagttcattgcaacctccgcctcacaggttcaagtgattctcctgcctcagcttcccgagcagctgggactacaggtgcacagcaccacgccgagctaatttttgtatttttagtagagacagcgtttcaccatgttagccaggctggtctcgaactcctgacctcaagtgatccacctgcctcagcctcccaaagtcctggggttacaggcatgagccactgcacctggcctctttcagcagtgttttgtagttctccttgtagagaccttccagttccttggttagatctgttcctaggtatttgtgtgtgtttgtgtgtgtgtgtgtggctattgtaaatgggattccgttcttgatttgactctcagcttgaacattattggtgtatagaaatactactgattttcatacattgatttcatatcctgaaattttactgaagttgatcagttctaggagccatttggcagagtcttcagagttttctaggtatagaattatatcatccgtgaagagggataacttgacttcttcattccattcccttttgggatgccttttcttcctttctcttgcctgattgctccgactaggacttccagtactatggggaacaaaagtggtgtgagtgggcagctttgtcttttgcctgttcttaaggggaatgcttccagcttttgcccattcagtacgatgttggctgtgtgtttgctatagacggctcttactattttgaggtatgttccttcaatgccaagtttgttgagggtttttatcataaagggatgttgggtttttttttttttttaagatggagtctcgctctgtcgcccagactgtggcacaatctcagctcactgcaacttcaacctcccggattcaagcaattctcctgccttagcctcccaagtagctgggattacaggtgcctgccaccatgcttggcttatttttgtatttttagtagagacagggtttcaccatgttggccaggctggtctcgaactcctgatctcaggtgatccacccacctcggcctcccaaagtgctgggattatgggagtgagccactgcagccggccaggtgccagaattcttaacactggttccttctcatctagaaactctggcccttctaatttctgtaattattttcatgtggatagaaactttttctttttctttccctacattattattgtccgcctcccctttcccctactccctagggagtgtgattgcatagaatgttgggtaggctttttggccttgtttctataggcttatgcagtttttttttggcaggttttatttatttatttatttagagatgaagtcttgctcccatcgcacacgctggagtacaatggcaccatctcggctcactgcaacctccacgtcccgggttcaagcgattctcctgcctcagcctcccgagtagctgggattacaggcgtgcaccaccatgcctggctaatttttgtatttttagtagagacagggtttcaccatgttggccaggctggtctcaaactcctgacctcaagtgatctgcctgcctcagcctaccaaagtgcaaagattacaggcgtgagccactgtgcctggtctttggcaggttttgttttgttttgttttgttttgttttgttttgttttgagacagagtctcgctctgccacccaggctggagtgcagtggcatgatctcagcttactgcaagctccacctcccgggttcacgccattctcctgcctcagcctcctgagtagctgggactacaggcgcccgccaccatgcccggttaattttttgtatttttagtagagacgggatttcaccgtgttagccaggatggtctagatctcctgacctggtgatccgcccgcctcggcctcccaaagtgctgggattacaggcgtgagccaccgcgcccggcctggcaggttttatattggactgtgcagttcaacctacaggccaggagatggcacttcgggctgaaagttgccggcagcagaagcaggtgggcatgtacctgatcttggtttcctgggaggtactgtctgttgtttcaggtcatgggctggagcatggagtgcccggtgccatgagcttcctgttccctggggtgggggacacggctgggcagagctggagcccatagcttgcacaggaataccccaatgatgaaggcaggcaccaggccgatgagggtggctgagaggagctccaggtgaaatgcgctgaggcctctgtgtagggctgaggggtgaggatattgcaccggctcctcatctagattggcaggaacgtgaatcgtgtccctgtcacacccctatcgtggggttcgtggctcctagttcagatgcacactgtactcctttcttctttttttttgagatagtcttctcctgtcgcccaggctggagtgcagtggcatgatctcagctcactgcaacctccgcctcccaggttcaatcaattttcgtgcctcggcctcccaagtagctgggattacaggtgccaaccaccacgcccggctaatttttgtatttttagtagagacagggtttcagccaggctggtcttgaactcctgacctcaggtgatccactcgcctcggccttccaaagtcctgcgattacaggcgtgagccaccaagcctggccactgtactgcttttttttttttttttttttttttttttgagatggagtctcgctccgtcacccagacttgagtacggtggcacgacttcggctcactgcaacctccgccttcgggattcaagtgattatcctgcctcagcctcccgagcagctgggattacaggtacataccaccacacctggctaatttttgtatttttagtcgagacagggtttcaccatgttggccaggctggtctcgaacttctgacctcaagtgatccacccaccttgtggctcccaaagggctaggattacaggcatgggccacatcacccagccagcacactgcactgtttcccaggaccacagtgtggtggagagcctcgggaaacgcctgtttcgtggctctctatggagtggttttggagctgcacatggtcactcagcctggtccagggagatttagggctcacctggcctctcatatggtggcactgctgcttcatgtaagaggggcaccacctctggggctgtgcaggtgtgtgttgtggtggtggccagctggctgggcccaacctcaggccctgagggaagtggtcgggtaccagcagtgctggaatggggtgggcagtaccccaattccctgagccctagatggcccactggaatgcatggatgagtgagtcccattgggactggaatggaggtggggctagagcagcgtccagtgctgactctgatggtggggtacgggctggtcccctgctcactggccaactctccagcgggtgcaggcagagtactccggcggtgggagcctggggggtgatcccaggcctgtcggatagggttggcagacgggcactctctgggtcacagctgaaacacctggggagtgtgggggtgggcaccggaagccaggaggtggcaagcccctctgggcagggagcctgtggtagacagtctggagccatgggaaagttggggccccagcctgagggcagcagtggcaggaccgcagtggcagccaccacggagggcctgtcagttacctctgggagtttcctgccagaggaatgtggaggccaccgaccagggtgctgaggccagggtgggtcagctgtgctgggggcccaagccggtcagcctggcctggcaaggagcagcggaggcaaggcctgaagcccatccatcccctcctcagtgcgatcctagtgtaacttcgccaggggtcctttccaccctctgcataaagacagaccagggcatggcaggagagaaagagtttgacagacacgaggccggtcatgccacgtgggagatggagttcatactcaaaccatccaaggctcacaggttaggttttcaaaggcagtttggaggaagtaaaatcaaaggcaacttggaaggggttggggggggggtccccaggttacagatgcttgctactgattggttggggcagagatgaactcctaggcctcctgggggccaattcgcatttaagtggggccaccggagcggcattgttggtccaggtgcagccgagggtgtcagacatgcaaaaaacctggaaaggtatctcaaaaaccaactggggaagctgtttatcttacaacttctggaacgtcagcgccttagctggattcaggttcctttcactgcctcagcctgatgggctcctattagctttacaaaagcagttgagtttgcagtaaagcctattatcatttaaactgtagcctaaatgtcttccaaaattagcttggcccaacagcccaggattaattgagggtgagttagcttagtttactattcgcattttctcactgacagaactttcgtacaggcggcttcactagcaggcggacaaagagcctggccttccttgttgctggggctgtggcagctgacaacagggtgctcatggggtgtgcagggatccaaggcctgtggggctccgcacgggcttgaacggtgctctgcggagactccaggctgcctccatgttgctctggaagctcagggggtcaggggggctcttctccgcccaggattgcaaaggattgtgttagaagtgtgggtccctggccgggcatggtggctcacatctgcaatcccagcactttgggaggccaaggcaggtggatcacccgaggtcaggagttcaagaccatcctggccaacgtggcgaaacccccttcactaaaaatacaaaagattacccgggcgtggtggcgagcgcctgtaatctcagctactcgggaggctgaggcaggagaatcgcttgaatccgggaggcagaggctgctgtgagccaagatcacaccactgcactccagcctggacgacaagagtgagactccatttcaaaggaaaaaaaagtgtgggacccccagggactctcactcttaccctttctctgcatcagggagcttcccccaactccgctgcaatcccaggagggcagctgcccaaccttgcctgttctccaagtcccaccgcagccctggtgaatcccagcatggtgttctggtctatgcccttgaagaccgggcagttaccctgtttcctctccatgaaagcagcgcactggggggaggggggagggatagcattgggagagatacctaatgctagatgacgagttagtgggtgcagcgcaccagtatggcacatgtatacatatgtaactaacctgcacattgtgcacatgtaccctaaaacttaaagtataataataataataataaaaaagcagcgcacactagctgcgtccaccagccatcatgaactgcaacccacaatcacatttgttaatagtaaaatattttcatactttattttatttgtatattttatattaagttaatattttatttttataatgattatatgttaatgttttctattgattaatgttaatattttgggtattagaatgtgggtattttgggttagaatttcaagttatttttgctttttttttgagaagagtctcactctgtcacccaggctggagtgcagtggcgcgatctcggctcactgcaagttctgcctcctgggttcacgccattctcccgcctcagcctctggagtagctgggactacaggtgcctgccaccatgcccggctaattttgtttttgtattttagtttcaccgtgttagccaggatggtcttgatctcctgaactcgtgattcgcccgcctcggcctcccaaagtgcttggattacaggcgtgagccaccgcgcccggcctatctttgcttttttaatgtggctactagaaatattaaaattacatacttggccgggcgcggtggctcaggcctgtaattccagcactttaggaagctgaggcgggcaggtcgcctgagggcaacctggccaacatgttgaaactaaaaaatacaaaaattagccgggcgtggtggtgcatgcctgtaattccagctattccggaggctgagccaggagacccctttgagcccaggaggcagaggttgcagtgagccaagattgcgccactgcattccagcctgggcaagagcaagactgtctcaaaaaaaaaaaaaaaaaaagaaattacatacttgctctcattgtatttgtttggacagcaccagttctagatacaaatgtggcagtatttttcaaaatcttttattcttgagacagagtctcgctctgtcacccaagctggagtacagtggtgcaatctcggctcaatgcaacctctacctcctgggtttaagcgattctcctgtctcagcctcctgagtagctgggattacaggcgtgtaccaccatgcccaactaatttttgtgattttagtagagacggattttcgccatgttggccaggctggtctgcaactcctgacttcaggtgatccgcccgcctcggcctccagggctggaactataggcgtgagccaccgtgccaggccaaaaatctcttaatgtctattctttgagtcaacatttccacttattacactgctttttgttttttgttttttgtttttgagacagaatctagctctgtcacccaggctggagtgcagtggtgcaatttcagctcactgcaacctccacctcctgggttcaagcaattctctgcctcagcctcctgagtagctgggattacaggcgcctgccatcatgccagactaatttttgtatttttagtacagacggggtttcaccatcttagccaggctggtcttgaactcctgacctcatgattcacccacctcagtctcccaaagtgctgggattacaggtgtgagccaccgtgcccggccacaccatttttatagcattaatttaactttcttccatgatgtagatacatggacattgtcatttacccaaggaacttcctgttatatcctcaggatctccttagtaaaaattacactgatcagactttctatgcagtatgtggcaaaactcatgaggatatcggaggaacaatctaccttctctcttttgccagactggactgacagtcattcagctataatgtagcaagtgaactagacaactgaaactttaaataaggacacaaaatgagagagttaagtattttgacaaaagtcttaggtgaaatcaagccaactgctctgcaggcagggactttaatggtaagacacatcctgagtaaacaggtagaatgccgttgcgcttcaagccatgccgggaaacagaagaggagccgaggtcaggaaagattgagggcatctgtggaattcgcaattttactcaggatgtaaggttaagtcttgctaagaatgtgactttcagtaaagatcagatacaagtgtcctagaagacgccagagaaaatctgtttgaagtaaacatgatggccgggcacgctggctcacgcctggaatcccagcacttttagaggccagaggcaggaggatggcttcagctcaggagttcaagaccagcctcggcaacaaggtgaaactccatctctactgtaaatacaaaaattaccctggtgtggtagcgcatgcctgtattcccagctactcgggaggctgaggcaagaggatcacttgaggccgggagttccagaccgcacctggctatttttttttttttttgagatgaatttcactcttgttgcccaagctggagtgcaatggtgcaatctcagctcactgcaacctctgcctctgggttcaagcctcagtctcccgagtagctgggattacaggcacctgccactgcgccccagctaattttttgtatttttagtagagacagggtttcgccacgttggccagactggtcttgaactcctgacctcagatgatccacctgccttggcctcccaaagtgctgggattacaggcatgagccaccgcacccggccattttaaatgtttttaccacaaaaaaaaaaaaaaatggcacgtaaggctgggtgtggtggctcacgcctgtaatcccagcactttgggaggccgaggcgggcagatcatgaggtcaggcattcgagaccagcctgaccgacatggtgaaaccccgtctctactaaaaacacaaaaattagccgggaatggtggggcacacctgtaatcccagctactcaggaggctgaggcaggagaattgcttgaacctgggaggcggaggttgcagtgagctgagatcacactactgcactccagtctgggcgacagagggagactccatctcaaaaaaaaaaaaggtatgtaaggtaatgaatacgttaatcaacctgatttagcaattccacaatgtatacatatttccaagcttcatgtataccataaacatacacaattttaatacatataatatatgcaattgtacaccataaacatagacaacttttatttgtcaatttttaaaaatgtaagtttttaaagttattttggctgggcacggtggctcaggcctgtaatctcagcactttgggaggccgaggcaggtggatcacttgaggtcaggagttcaagaccagcctggccaacatggtgaaacctggtctctactaataaagaaaaattagctgggcacagtgtcatgtgcctgtaattccagctactctggaggctcacacaggggaatcacttgaacccgggaggcggaggttgcagtgagccaagatcatgccactgcactccagactgggcaatagagcgagactctgtctcaaaaagaaaaaaaatcaaatcaaataaagatattttgttaagctgggtatgatggggtacctgtagtcccagctgcttggaagactgaggcaggaggatcacttgagcccaggagttcaagttccgcctgggcaacagagcaagtcctcacctctataacaaacaaacaaacaaacaaacaaacaaacaacaaaataaagttttttaaaaagtgtttgctcactggcaatgcacaaggggctttaagtgtatcccaccttcatgctccacagagcttcacactttcccttcatccagaggacacctccagtggactggaccatcccttttccgtggttaaactaattcagcaagggactagggatgttttcatgaggagtttgggagcttgacgctggtggctgttgattgttctccaagctgtgtgggatcccatatccaaaatacatagcaaatcctagcagggaaatgagacaatgaaaggaaatgtagtcaccccttcccttataaatgccctatagcgattatactgtggtttgtttatttggaggttttcttgtttcttttatttagaaatagagcttcgctccattgcccaggctggagtgcagtggcatgatcatggctcactgcagcctcgacctcctgggttcaagcgatcctcccacctcagccttcagaatagatgtgactacaggcaggtgccaccgtgcctggctaatttttttttttttttttttttttttttgagacagcatctcactctgtcacccaggctggagtgcagtggcacaatctcagctcctgtcgcctgcgctggagtgcaatggcatgatctcggctcaccgcaaactctgcctcctgggttcaagcaattctcatgcctcagcctcctgagtaggtgggattacaggcgcccgccaccacgcccggctacttttttgtatttttagtagagatggggtttcaccatgttggccaggctgttcttgagctcctgatcttaggtgacccacctgccttggccccctgaagtgctgggattataggtgcgagccactgcgtgcggccagttttttattttggtagaggtggagtctcgccatgttgcccaggctggtctggagctcctggtctcaagcgatgctcctgccttcatctcctgagtagctgggactacaggcacaccccacactgttagcctgagacagctatagggaaaggtcgcaggaagagtgttgggctcagacacccaagaggcctctttttttccaggaagccactcaccaatcaacatccagactccacattgggcccaggtctcagtggtcatctgcatcatcaggtaaacatgtgcagagatgctgaccagaggagaacaggcaacagggggacctgcaggcaaagcgttaaccgtgagcacaccacgaacgtctgcaagggacccttattccaaggggtgggaaggcctcagctctgttgcagtcgcatattcaatgcctattcttttttttttttttttgagacagagtcttgctgtgtcacccaggctggagtgcagtggcgcgatctcagctgaatgcaacatccgcctcctgggttcaagcgattctcctgcctcagcctcctgagtagctgggattaccggcacacaccaccatgcccggctaatttttgtatttttagtagaaccggaatttcaccatgttggtcaggctggtcccgaactcctcgcctcaagtgatccacccgccttggcctcccaaagtgctgggattacaggtgtgagccacctcacctggctcaatgcctgttctgagtaggtattccattgggtgttctggaagagacaggttttgggaagtactgatatgtgggggctggagggggtgtccatgaacagtccattggtttttcgcaactgccctttttacccctggtcccgtagagtatttagagcttgaggcatgcagagtccactgactcaggagggtggtgtggggacataaggccacctaccttgaagtaaagaggagtgttgctctggggctgtctccagacggtgaaagtgaatcccacaatgagcaccagcagcaacacagccgctgcgatgtagatcagctctccagagaacaggcgtttgggccaatgggccaataccaggcatagcatggacagcaggacaactggaaaagggtcaaggttggggagaacaggttcaacttcagaagctaaataagtgaagatctcgggccacatcctatcccccaaaccatatatatgggtatgggtgtgtgtgtgtgtgtgtgtgtgtgtgtgtgtgtgtgtgtgtgtgccagcctcccaagtagggactacaggcacgtgtcagcacacccaaatactttttttttttttttgagatgcagtttcactcttgttgcccaggatggagtgcagtggcacaatcttggctcactgcaacctctgcctcctgggttcaagtgattctcctgcctcagcctcccaagtagctgggattacaggtaactgccaccacacccagctaattttttgtattttttttttttttttgagaaaaagtctttctctgttgcccaggctgaagtgcagtggcgtgatcttggctcactggaaactcggcctctccggttcaaataattctcctgcctcagtctccccgagtagctgggattacaggcgtctgccaccgtgctcggctaatttttgtatttttagtagagatggggtttcaccatgttggccaggctgatctcgaactcctgaccttgtgatccactcccccccggcacccggcctcccagagtgctgggattacaggcgtgagccactgtgcctgacctaattttttgtatttttagtagagatggggtttcaccatgttggccaggctggtctcaactcctcacctcaagtgatccacttgcctcagccttctaaagtgagccaccacacccagcctaaacttttaattttatatatatatatttgtgtgtgtatatgtatgtgtgtgtgtgtgtatatatgtgtgtgtgtgtgtatatatatatatggctttttgtttgttttttgagatgggatctcgccccattgcccagactacagtgcagtggtgtggtcttgattcactgaagcctcgactgcccaggctcaagcagttgtcccgcctcagcctcccaaagtgctgggattccatgtgtaatccactgtgcccggccaaaagtgcgcctactaagaagggccaccacatcttcacaactcctctcaactaccaaagccccacactccctactcggccccctgccgcatgctatcaggttcaaaacaccccgcggagaaacgccactgctcaccaagcagaaaggcacatccatagacgatgcggccccatctcggggtggggatggtgctgacagggctccacagactcgccggagtgctggacgcttcaggaacacatgctggggattctgctttgggtacagaattcatctcaactacttcctccttcggcttctcgttcttgctgaaattctcgtctggctggtacctgaattagagagagtagggcaagattaacccaggtccctgttcatccaacatcagagagcctaatacacccacggtagctcccacgtatctgaggtttcatctacccgtatccactacagtccaaaaatagtaaatggaaaagtccagcagtaatttgtaagttttctttctttttttcctttttttcttttctttctttttttttttttttgagacggagtctcactctgtcacccaggctggattgcagtggcacaatctcagctcactgcaaccacccccgcctcccaggttcaagcaatctcctgcctcggcctcctgagtagctgggattacaggagaccaccaccacgcccagctaatttttctatttttaggacataccaggtttcaccatgttggccaggctggtctcaaactcctgacctcaagtgagccacctgtctcggcctcccaaagttctgggattacaggcgtgagccaccgcgccccgccgtaattgataagttttcaattgtgtgcagcttcaagtagcggcattccacgctgcccatgcccaggatgtaaatcatccttttgtccagtgtgtccatgctgtgaacgctaccggccgtgttaagtcacattaggcaactgagttatggatgggaaaatgatcatgtatagggactggtactatccgcggtttcgggcatgtactgggggtcttggaacgtgtcccccgtggataagcaggggctgttgtactcctcccactcctgtatgtgtagcaatgcaccgaggggccaggaggcaggcagaagagggctgggaaccccatcaatcctcacgtgtctaggaccccagtctcacctgaggacaagaacagaaaaagccaccaaggagtaagcaagcatagtcccgatggacaagaggctcacaaggtcactgaactcaaacaggaaagccatgattgctatagtcagggctcaaaacagggtgagttccaatgttccacagcactagagggtgactgtcgttaacaacttataagagctggaaaagcactttggaaggctaaggtgagcggatcacctgaggtcaggagttcaagaccaccctggccaacatggtgaaacgtcatctctactaaaaatacaaaaattagctgggtgtggtagcacatgcctgtaatcccagctactccggaggctgaggcaggagaatcgcgtggacctgggaggcggaggttgcagtgagctgagatcgtgccactgcactgcagcctgggctacagagcgagactctgtctccaaaaaaaaaaaaaaagagctggaaaaataggttttcagtgttcccaatgcaaggaaataatcaatgtttgaagtgatggttatgatattaccttgatttgattattacatcttgtatacatgtatggaaatatcacactgtaccccacgaatatgtacaattattgtgttaattaataataggaatgtggccaggtgcaggggctcatgcctgtaatctcagcacttagggaggccgaggcaggcggactgcttgagcccagaggttccacatcagcctgggcaacacagacccccgcctctacaaaatttgaatattagccaggtgtggtgccactgtacactggcatgggtaagagtgagatcctgtctcaacaacaacaaaagtcagattatgtacattttctttaattttttttttttaaacaggaatcatcatacctccctgcagccctaacctgctgcgctcaagccatcctcccacctcagcctcccgagtagctgggactacaggtgtaccaccacacccagctaatttttttttttttttttgagacggagtctcgctctgtcgctcaggctggagggcagtggcgcgatcttagctcacagcaagctccgcctcccacagccaactaattgttaaaaatttttttgcagagacaaaaaaatgatctcagggtctggctatgttgcccaggctggtctcaaactcctgggctcaagtgattctgccttggcctcccaaagtacgggggttacaggcatcaggcactgcaccccgccccattttctatattgtattgtattgtatttattttaattattttattttattttgagacagggtcttgctttgtcacccaggctggcgtgcagtggtgtgacctcagctcactgaagcctcaacctcctgggctcaagcaatcctcccacttgagcctccccagtagctgggactacaggcacgttccagcatgcctggctaactttttttttaatttttgttgagatggaagtctccctgtgttgcccagggtggtcttgaactcctgggatcaagcaatcctcccacctcagcctcccaaagtgctggggttataggcgtgagccactgagcctagtcccattttcctgttaaactttttattaaataaacttttgtaatagccaactttttaaaaaaattgatgaataataataaaagcaaaaatggatgggctgtgggggaggatgaggaactaactcatagaaaatggatgaaagaaagcctggattctgggcctttacctgcaagggtcccagcaacgacagtggccaccacaggggtgctggtgtgggcgtggatccgggcgagtccgcagaaaaggagcctgtcctcagccattgactagagcacgcgaggcgtggggaacgtggcacccaggaggctgcatgcaggagaaaacgggaacacgcatggggactcaggaagcaagagggactggggcttctgctctgtcgcctccgtgggtgaaacgtctcctccctttaccaaggcccaggacacccgagaaccagacagcagacagggagagagcatccagcactgacctggaggaaagggcacagagggtgccgacggccacagcatatctgatgggggcccatccaatgtggacaaaagcctccggcaaggggttctcgggacatatcaggtagtaggggcactatgagggtgagcgccgctgagacaccaaaataggccaagaagcagatgaagatcgaggtcacagtgcccaaggggatggagcggtgagggtggaggcggtgagggtggagggcttcttctcctgcgggacaggtatatgcaccgggcggtgagggtggagggcttcttctcctgcgggacaggtatatgcaccgggcggtgagggtggagggcttcttctcctgcaggacaggtatacgcactgggccaggaaaatgcacggaagtgaaggtacaaaaccctcttccctcttccccatctgagaacagggtagcctttaatgaaacctgtgcccagcggcagcccaaacagtgcccaaacccccgatgagacagaatgaccgtgttacctgtggtggcaatgccatcaaaacccacaaatgcaaagaaacacgtggccgctccatggagaatcacgccaaagccaaaaggcacaaaccctccagagcccagggagcccgagctacggggacagaaggaacaagaaacattggtaaggtgtgcagccgtctttctgggacgactcagttaactccaactgctcagttaattccacaagcccggggcccccactgccatccccactccccatcatctggctccgtcaacccagattccccctattcccacaatagtccaggttctgcaccccaggccccactcctgtgtccaagagggcacctctggccagttgcaatggctcacgcctataatcccagcactttgggaggctgagtcaggtggatcacttgagcccagaggttgagaccagcctgggcaacatggcaaaaccccatctctacaaaaatttaaaaacttagctaggtgtggtggtgcacacctctagtcctagctactctagatgattgcttgagcctgggaggtagaggctgcagtgagccatgatcgtgctactgcactccagcctgagggacagagcaagaccctgtttcaaaaaataaaaataagttttaggctgggagcagtgagtggttcacacctgtaatcccagcactttgagaggccaaggtgggcagatcacctgaggtcaggagtttgagaccagcctggccaacatggtgaaaccccgtctctaccaaaaaaaaaaaaaaaccaaattggccgggtgtggtggcacgcacctgtaatcccaggtggctgaagcaggagaatcgcttgaacccgggaggcagaggttgcagtgagctgaaattgtgcgaccgaaatttggcctgggcgacagagtgagactccatctcaaaaaataaaaataaaggtaaatttgaaaataaaaaaacaggccaggcacagtgggtcacacctgaaatcctagcactttgggagtcagaggtggacagatcaatggaggtcaggagttcgagaccagcctggccaacgtggtaaaaccccatctctattaaaaatacaaaaattagccgagcatggtggcaggtacctgtaatcccagctactcggaggctgaggcaggagaatcgcttgaacccgggaggcagaggttgcatgagccgagatcgtgccactgcactccagcctgggtgacagagtgagactccatctcaaaaaaaaaaagtaaataaataaataaataaaaataaataaaaattaaaattaaaattaaaaaataaaaaaaaataaaataaacctgtgccctcacctgtgggtgtcgttggaccaccccagctcggcccatttgtagtcggcgtctgtgagctgccagttgtgcagatctcccttgatgaagccggagaagatgacgcagctcagaaccaaaaggttcacacctgtgaagactttggaaccccaggctgactcccgagctcccagagccagcagtcctgtgggaaacatggaatatccagaataaataaacccacagagacagaaggcagatccgtggttgccaggagccaaagggaatggggaacgaccgcctaaagggtgcagggtttcccgcaggggtgatgaaaacgtttcccaattagatggaagtggcagctgcacaatgccgtggatgtactaaatgccactgaactgcatgctttcaaatggttcatttcaggccaggcgcagtggctcacgcctgtaatcccagcactctgggaggctgaggcgggcggatcacgaggtaaggagattgagaccatcctggctaacatggtgaaaccctgtatctactaaaaatacacagaaaaattagccgggcatggtggcgggcgcctgtagtcccagctactcgggaggctgaggcaggagaatggtgtgaagctgggaggcagaggttgcagtgagccaagatcgcgccactgcactccagcctgggcggacagagtgagactccgtcaaaaaaaaaaaaaaaaaaaaaggaaagaaaagaaagaaagagaaagaaagaaagaaagcgagaaagaaaagaaagaccttacaattcatttggaaacaaaaagagctcaaatagcaaaaggaatcctgaacaaaaagaataaagctggagacatcatgttacctgacttcaaaacatatcagaaggctctggtaaccaaaacaacatggtattggtataaaaacagacatatggctgggtattgtggctcacacctgtaatcccagcactttgggaggccaagaggggcagatcccttgagctcaggagttcaagaccagcctgggcaacatggtgaaaccccatctctacaaaaaatacaaaaattagctgcgcatggtggcaggcgcctataatcggagctacccaggaggctgaggcaggagaagcgcttgaacctgaagactgaggctgctgtgagccaagaccacaccactgtactttagcctgggcgacagagcgagactcggtctcaaaaaaaaaaaaaaaaaaaaaaaaaaaaaaacaaccaaaccagaaacaaaaaaaaccccaaacatatagagcaatggtacagtatagaaaatccagaaataaatccacgtgtgtaccggctggccaccgtggctcactcctgtaatcccagcactttgaaaggccgaagtgggcagatcacctgagatcaggggttctagaccagcctgaccaacatggcaaaaccccgtctctactaaaaatccaaaaattggctgggcataatcccagcactttgggaggccaaggcgggcaggtcacctgaagtcaggagtttgggaccagcctggccaacatggtgaaaccctgtctctactaaaaatacaaaaattagctggacgtggtggcacacacctatagtcccaggtacttgggaggctgaggaaggagaattgcttgaacccgggaggtggaggttgtggtgggctgacatcatgccactgcactccagcctgggcaacagagcaagactccatctcaaaaaataaaaataaaaataagccaggggtggtgcccacacctgtaatcccagctacttgggaggctgagtgaggagaatcacttgaacctgggaggcagaggttgccgtgagccgagattgggccactgcactccagcctgggtgacaagagcaaaactgtgtctcaaaaaaaaaaaaaaaaattaggcgggtgtggtggcatttatgcctgtaatcccagctactcaggaggctgagccaggagaattgcttgaaactgggtggcagaggttgcagtgagcagagatcacaccattgcactccagcctgggcgacagagcaagactctgtctcgaaaaaagaaaaaagaagaaggaaaaagaaatgatccatgggtgaggggttggatatcctagatgccgtgacatgatgatcattacctactccattcatgtatcaaaatatcacgtgccccattaatatgtacaattattatgtatcaaataagaaaaaagttcccttcattggctgttttaattttataccaccctaagtgaaatattgccacttagaaagcttagctgcaggtttagtaaattatagtgaagaaacacacctgaagctggagctctgccgggggcaggtgcaagggctgatgtggagtcccagcttgtccaaccagcggcccataggctgcctgcagctcaggatggctttgaatgtggtcccacacaaattcagaaactttcttaaaacattacgagtttgtttgtgattctgggtttttttcagcccatcagctatcgttagtgtattttatgtgtacccggagacaattcttcttcttccaatgtggcccagggaagccaaaagattggacaccactgattgtagacaaataaggaggccaccttcagacagagcactgtacgctgttttgttcttgtttttctttgagatggagtctcgctctgtctcccaggctggagtgcagtgggaccatctcggctcaatgaaacctccgcctcccaggttcaaacgattctcctccctcagcctccaagtagctgggattacaggcaaccaacaccatgcctgaccaatttttgtatttttagtagagacaaggtttcaccatgttggccaggctggtctcaaactcctgacctcaggtgatccaactgcctcggcctctgaaagcactgggattacaggcgcgagccacagagcccagccacaaagtgaccttctaaaaaaaacaaaaaatcctttttgcaagacaaaaagtgctctcatgataatttttttaaatttttttttgagacatggtctcgctgtgtcactcaggctggagtgcagcaggctcaaggcatcctcccacttgagcctcctgagtagctgggactatagtcccacattaccacacccagataatttttgtatttttggtacagatggggttttgccatgttgcctacactggtcttggactcctgggctgaagtgatccacccgcctcagcctcccaaagttctgggattataggcacgagcctccgcgcctggccctaatatttatggtggaaataaggagatgattgcggtacgatttcatgccttccacagtttattgacataaaaagagatttttaaaaaaaacattgacaatgcttaaggaggagaagaataacacgaacacacttcatagaatgcactctgtaggcaaagtacgttaaccgaatagtgagtgagttccaaatttttaaagtcctgttgctcacaggatggaggaaggactatgtgaaaagtaaagtctaattcaaatttgaggtgaactggctgggcgcagtggctcacgcctggaatcccagcactctggaaggccgaggcaggtggatcacctgaggtcaggagtttgagaccagcctgaccaatatggtgaaaacccgtctctgttaaaaatacaaaaattagccgggcatggtggtgggcgcctgtaatcccagctactcgggaggctgagacaggagaattgcttgaatccgggaggtggaggttgccgtgagccgagatcgtgccactgcactctagcctgggtgacagagcgagactccacctcaaaaaaaaaagtaagctgggtggtgcagtggctcacgcctgtaaaacactaacacattggggggccaaggcaggagaatcgcttgagcccaggaattcaagaccagcctgagaaacataggaagaccccatctctacaaaaaatttaaaaatgagtgggcatggtggcatacacctgtagtcccagctagttaggaggctgagacaggagggtggcttgaacccaggaggttgaggttgcagtgagctatgatcctaccactgcctggacaacagagtgaaaccggtctcaaaaacaaaacacaaaaaagcagacagcagcatagaaataggattggacgtggccgggtgcagtggctcacgcctgtaatcccagctctttgggaggccgaggcaggtggatcacttgaggtcaggcgttcgagaccagcctggccaacatggtgaaacctcgtctctatgaaaaatacaaaaattagccggccatgctggcaggcgcctgtaatcctagctaattgggaggccgggacaggagaatggcttgaacccgggaggcggaggttgcagtgagctgagattgtgccacggcattccagcctgggcaacagagtgagactcggtctcaaaaagaaaaaaagaaaaaaaagaccccctctctatgttaaagaatatttttaaaaaaggaagaaagaaaagaaataggattggacaaaatggatctgatctaaaggtcatagactgcaggggtcgggcggacggggaacccagcaaacctgtctctctgcattcctcctggcctctctgagcagccttccctcctgctgggcagagggcagaagcctctctggaatgagggtcatagacctaaaaccaaacaagataggacaggaattcctttatggtcagtgtttacagggaagatggagggaaaattagagtcagagattttaggttttatggcaggatttggggaaaagggattctggtgtctatggctcactttgggaaagacagtttctagtttctatggctagccttgggggagaaggagggtcaggaagaaacttccgcttctgaagctgcttcggaagcctttgttttgaggttatcggtttctgagccccaatattagcctgccacagtctaagctttcaaagcgcctgtcaaactcttgtggatctatgtatttcaaagaccaaaatcaacagctcacatatggggtccaagaggaggggggaggtcactgcacgttgtcacgtgtgagatctttgttgttgttgttgagatggaatctcgctctgtcacccaggctggagtgcagtggcaccatctcagctcgactgtaaccttcacctcccaggttctagcaattatcctgcctcagcctcccaagtatctggaattacgggtgcgtgccatcatgccccgctaattttttttttttttttgtatttttagtagagacgggggtttcaccatgttggccaggccagtctcaaactcctgaccccaagggatctgcccacctcggcctcccaaagtgctgggactacaggcatgagccaccgcgcctggcctcttgtgagatctgataagaagtcacgcactagaaggaagggaagagtgtactccacaaccccaaacgatgcgtttggaatcatttcaaacccacataacaagagtttcatacggaattgggacagaacatggcccctaatgagcccccctaaataattctcaaggaccacttctccaatgacgaaggagattgaggatttttttttcctacgtttattggccgtgtggatattttgcctttgtaaaatatgtgtccaagccttttgcccatttctccagtgggtagtatttcctttgttttttttttttgagacaaagtctcactctgttgcccaggctggagtgcagtggcctgatctcggctcactgcaaaccctgcctcctgggttcatgccagtcttctgcctcagcctcccaagtgctgggactacaggtgcacaccaccacgccctgctaattttttgtatttttagtagagatggggtttcaccatgttagctaggatggtctcaatttcctgacctcgtaatctgcccgcctcggcctcccaaagtgctgggattacaggcgtgagccactgcacctggcctaaaagaatctttaaattgtccatgagcgatggtgcgtgcctgtggtcccagctacttggaggctgagaaggaaggatcccttgagcctgggagtttgaggcagcaatgagctatgctcttaccactgcactccagcctgggtgaaagaggaagaagacccttaataggcggaccacggtggctcacgcctgtaatctcaatactttcagaggcctaggtggaagaattacttgagaccaggagttcaagaccaacctgggcaacatagcgagaccctcatctctccaaaagtttgaaaaagaaaaaaaaaatttttaatgaaacagaagtcgttaattttattttattttctaagacatcttgttatagcaaaaagtccttaattttaatatagtctaatttatatattttcttcattgtaaaaatttttgggtcctatctagcaaatgttagcttacctctatgtaataaagacattcttctgtgttgtcttctaaaacaaaacattgttttattttctgattttaggtctgcagttcatttgtagatttttgtgtctaggattaggtagggttaagatcatttgtggccaggcatggtggctcacaccagtaatcctaacactttgggaggctaaggcaggaggatctcttgagcccaggagtttcagaccagcctggggaacatagaaagaccctgtctctctattttttttttcagttaaatatatacttttaaaaagatcatttgtggtgctatagttgtgggtgtttaatttgtaatttactttgttctgttgatctatctaattttttttttagacggattcttcctctgtcacccaggctggagtgcttcagcctctcaatgccatcatgcccagctaattttttggacttgtagtagagacagagtttcaccatattgaccaggctggtctcgaactcctggccttaggtgacccgcccacctcagcctcccaaaatgctgggattataggcatgagctactgtgtccagccagatctgtctaatttttttttttctttgagacgcagtctcactctgtcactcaggctggagtgcagtggcgtgatcttggctcaatgtaacctccacctcctgggttcaagtgattttcctacctcagcctcctgagtagctgggattacaggtgcgtgccaccacgcctggctaatttttgtatttttagcagagacggggttttgccatgttggccaggctggtctcaaactcctgacttccagtgatccgcccaccttggcctcccaaaatgctaggattacaggtgcgagccactgtgcctggcccagagctgtctaattttaaagaatgtatgaagattcagatttaggttcctgctattatgttatgggaaatcttttcctagtttcttctgattaatataaatccttaattttatttttatttatttttttactacagtcctcttttattactttttatttttcttaattttaatataatgaaaagttcgatttttcctgttatggttagcatttttttcttctgtttaagaggtgtttcctggctgggtgtggtggctcacacctgcaatcctagcactttgggaggccaaggtgggaggatcacttgaacccaggagttcaagaccagcttgggcaacatagtgaaacccttgtctccaatttttttaaattaaaaattaaaaaaggcggggctgggtgtggtggctcacccctgtaatcccagcactttgggacgccgaggcgggtggatcacctaaggtcagcagttcgagaccagcctgaccaacatggagaaaccctgtctctactaaaagtacaaaattagctgggcgtggtggtgcatgtctgtaatcccagctattcgggaggctgaggcaggagaatcgcttgaatccaggaggcggaggttgcagtgacccgagattgcgccattgcactccagcctgggcaacaagagtgaaactctgtctcaaaaaaaataaataaataaaaaataaaataaaaaagaagtgtttccctagcgtgaagacatgaagctcttctgtaaacttcattgttctgcctttacaattcaatctacaacccactagaattaatcttccgtatatatagcatggggtggaggtcaaacaccttttttccatatggatgttcagctgtcccagtgtcatttatttaaaagactgtactggacctggcatggtggctcacgcctgtaatcccagcactttgggaggctgaggcgggtggatcacttgaggtcaggagttcgagaccagcctaaccaacatggcaaaaccccatctctgctaaaaatacaaaattagccaggtttggtggtgcatgcctgtaattccggctacttgggaaactgaggcgggagaatcccttgaacctcataggcagaggttgcaatgagccaagatcgcaccattgcattccagcctgggcaacaagagcgaaactctgtctcaaaaaataagaaaaaatagaggccgagaatggcccttgctgccaccaacatggagactttgtaccgtgtcccgttcttagcgcttgaatgtcccaacctgaagctgaagaagccgccctggctgcacatgccgttggccatgactatgtatgctctggtggtggtgtcttacttcctcatcaccagaggaatcgtttatgatgttacggttgaaccgccaggtgttggctctatgactgatgaacaagggcatcagaggccagtagctttcttggcctacagagtaagtggacaatattattatggaaggacttggatccagcttcctgtttacaatgggaggtttaggtttcataatcctggaccgatcgaatgcaccaaatatcccaaaactcaatagatttcttcttctattcgttggattcgtctgtgtcctattgagtttttttcacggctagagtattcgtgagaatgaaactaccgggctctctgatgggttagagtgcctttaagaagaaatcaggctgggtgcagtggctcacgcctgtaatcccagcactttgggaggccgaggcgagcggattatctgaggtcaggagttcgagatcagcctgggcaacatggtaaaaccccatccctactacaaatacaaaattagccaggcgtggtgacacatgtctgtaatcccagctactcgggaggctgaggcaggagaattgcttgaacccgggaggcagaggatgcggtgagccgagatcgcaccattgcactccagcctggacaacaagagtaaatctccgtctcaccaaaaaaaaaaaaaagaaaaaaaaaaagaaatcagtgcatactggatttgctcctgtcaatgaagttttaaaggctgtccaatcctctaatatgagatgtagaaaagaaggaagagcagcagtaaaagaaatatctagtgaaaaaccaggaagtgtattgaagcttggactagaatttcttctttattaaagagacaaatttatcacagtattttcttttcctgctgaccacattgctataccaatgatgatgagtggcattttcttcttagttttttatttctttaagaaaatacaagccaggcgcggtggctcacttctgtagtcccagcactttgggaggccaaggtgggcagatcacgaggtcaggagttccagaccagcctggccaccatgttgaaaccccatctctactaaaaatacaaaaattagccgggcgtggtggtggcggggcacctgtaatcccagctacttggaaggctgaggcaggagaatcacgtgaacctgggaggcggaggctgcagtgagcctagatcgctgccactgcactccagcctgggcgacagagcgagactctgtttcaaaaaaaaaaaaagaaagaaagaaagaaaagaaaatatactgcatacctacaactataatagcaaatatagtgattattttttacaacccccttaacactttttggagatgacatttctgactttcagaaattaacataaaatcaagaagcaagattccatgagctgagaactctggacagctggtcagctttacctacggagctttggctttaactagagtgtgtgatggtagattatttcagataggtatgtaagactgctgcctgaacaataacatgtatgaaaggaacagaaataaatactaattaaaaaacaaaataagaaaaaataaaaaataaacactactatggacatggtagctcatgcctgtaatcctagcactttgggatgccaaggtgggtggatcgcttgaaccaaggagttcaaggagttgggagaccagtctgggcaacatagcaagaccccatctctaaaaaaaaaaaaaaaaaaagagtactaaagactcagagatagaaaaatggaaattattcatattgtctccagatttttttttttttggacggagacttgctctgtcacccaggctggagtgcagtggcactatcttggctcactgcaacctccacctcccaggttcaagcaattctcctgcctcagcctcccaagtagctgggattacaggcatacgccaccaaacccggctaattttgtacttttagcagagacagggttttgccatgtttgtcaggctggtcttgaacccctgacctcaggtgatccacccgcctcggcctcccaaagtgctgggattacaggtgtgagccaccgcgcccagccagtagtcttttatccttgtaacagattaatcttttctagggaaatggagacctttcattttcatgtcctttttacatccctgttgattgtatctctgcctccattctgttgatcggaatgacactaacttaatttgggttctctaaagcagacactgatacaaaggcttcagttccagaggtttatttagaatgtgatcctaaaccaagagggaggtagcagggagagtaagacaggaaaggatggggagccaacaccttatctaaggacatgttgaggccaggcgtggtggctcatgcctgtaatcccagcactttgggaatccgaggcgagcagatcacaaggtcgggagtttgagaccagcctggccaacatagtgaaactctgtctctactaaaaatgcagaaaacaggccgggtgcggtggctcacgcctgtaatcctagcactttgtgaggccgagacgggcggatcacctgaggttgggagttagagaccagcctgagcaacatggagaaaccctgtctctactaaaaatacaaaaattagccttgcgtggtggtgcatgcttgtaatcccagctacttgggaggctgaggcaggagaatcacttgaacctgggaggcggaggttgcgatgagccgagatcgtgccattgcactccagcctgggcgacaagagtgaaacttcatctcaaaaaaaaaaaaaacaaaaaacagaaaaaattagctgggcctggtggcagacgcctgtggtcctagctactcaggaggcaaaggcaggagaattgcttgaacctgggaggtggagattgcagtgagccgagatcatgccactgcactccagcctgggtgacagagtgagactctatctcaaaaaaaaaaaaaaaaaaggataagttgctgaagtctgtgaagtggacaatgagggcttgattcctttgaagcctgttgaagactgtttacgcttcctcttatcatcccctgcctcatcccctgtcacagagatgaaagactgggacatttctgtgccaaatttcatcccacattgggtgaggctttccctgagacatgttgacttcctgcagttcaaagctactttcttctttagacagggtctcgctctgtcccccaggctagagtgctatagcgtgatctcgcctcactgcaagctccgcctcccgggttcaagccattctcctgcctcagcctccccagtagctgggactacaggcacctgccaccttgcccggctgtttttttgtatttttagtagagacagggtttcaccatgttagccaggatggtctcgatctcctgacctcatgatccgcccaccttggcctcccaaagtgctgacattacaggtgtgagccaccgtacccggcctattttcttctttagacagggtcttcctctgtcccctaggctggagtgcagtggtgtgatcttggctcactgcaacctctgccccctgggttcaagagattctcctgcctcagcctcctgagcagctgggattacagacatgcgtcactatgcccggctaattttttgcattttttggtagagatggggtttcaccatgttggtcaggctggtctcgaactcctggcctcaagtgatctgtctgccttggcctcccaaagtgctgggattacaggtgtgagccaccccgcccggggcaaagctattttccattttaaattttttgttattgttgttttgagaccaagtctcactctgttgcccaggctggagtgcagtggcatgatctctaaattttgtatttttagtagagacgggttttcaccttgttgcccaggctggtctcgaattcctgacctcaggtgatccacttgcctcagccgcccaaagtgctgggattacaggcgtgggccaccatgcccagcctgccaaagctattttctatgggataaatgacagcagaaaggaccccagagcaaaatactacaaagatgtatggcacgtgcatgaggtgagagtatggtagaatcaagtgagtctctgctttcatgagactgaacagtgaggctcaggttaaaattagaggtgtacaagagagtatgatatggacatctgctactgaacaatccttgtgcttcttgaaaatgctcatttccatattttttattttttattttttttcagatacaaggtctcactgtgtcacccaggctagattgcaggggcacaattaaggttcactaaagtcccaaccccccgggttcaagcaatcctcctgcctcagcctctggagtagctgggactgcagttgcatgccacagtgcccggctaatttttttattttttgtagaggcaagggcttgctctgttgcccagattggtcttgaactcctggcctcaaatgatcctcccacccgtgcctcccaaagtgctgggattacaggcataagccactgcacccagcctcatttctatatgtaagttcatttagtcattaagtcttgaagcaaagatccagccacgatctatataaaattttcaatacaggccaggcatggtggctcacgtctataatcccggcactttgggaggctgaggcagactgatcactttaggtcaggagttccagaccagcctggccaacatggtgaaacgctaatacaaaaaattagctgggcatggtggtcagcacctgtaatcccagctgctagggaggttgaggcaggagaatcggttgaacctggaggtagaggttgcagtaagtcaagatcacgccactgcactccaccctgggaaacagagcaagactctgttccaaaaaaaaacaaaaggcaatctttcctagaaaaaaatagtttctgcacattcttaggcacgcatttgtaggctgctatagctatttaaaattttcaatacaatatgtttaccagagcaaactacaatcctcattgttatgtgggccccaaaccattactgatactcatctgtttcccccacgtcgtctacatttcctcatggtgggccagtacttcattttttgtaactcatttgcctgctagggtgactcaggcctttgtttctgagagatctgagtctggtgttgctaggaaggaaaaggttaactagtctataatccattctttctcccaacctggtgatgtctgaggaggcatcccttggtcaaacttctttgtaaacatgctaatcagatctcatggtatttattagaggaaaacaaccagagattcttatctgtgagatgctttcagcaggacatacttgttctttcttgatgtcttgcagtaaacaaggaatttaggggtttatgggcatgagccactggaaaatgtcagcgtcacatatttagttaagagagagagagagaggggctgggcgtggtggttcatgcctacaatcccagcattttgggagactgaggcaggaagatcacttgagcccagaagcgtaagatcagcctaggtaacataatgagacctcgtcttattaagagtctgattctaccctcccttggtgttatctcagttactgtacttttacagggctgtggttgtgcaacttcctgctgggcatggggaattctctgagttccagacaagaaccttcctgcccaatatgcagcagcaacccagtctcttcataatgctcgtggttgattatccatgcccgccaactacctcatttctctgcccagtgctttatcagcctgaagagcccacagtcaccaggcagaaaaccttactgtgcttcttggtgaaagtgttccctcttcaaaaatgaagacatcacgccagataaggtttggggactagaagcacaatttcttcaagtgggtccctagacaggatattgataaatgccaattctgtttcactccctggtagctacacctgtatattctaactactagggtcacagccccttatattgactgttggttatatgcagatattgcatcttagaggacagcaccccaaacccatgggatgttatacctgggctgacactttagttgagccctttaaaaagccattcctgggccaagcccggtggctcacacctgtaatcccagcactttgggaggctgaggcgggcggatcacgaggtcaggagatcgagaccatcctggctaacatggtggaaccctgtatctaccaaaaatacaaaaaaaattagctgggcctggtggcaggcgcctgtagtcccagctattcagaaggctgaggcaggagaatggcgtgaacccaggaggtggaggttgcagtgagctgagactgtgccactgcactccagcctgggcgacagagtgagactctgtctcaaaaaaataaataaataaataaataaataaataaataaaaggccattcctggctgggcatggtggctcacgcctgtaatcccagcactttgggaggccgaggagggcggatcacctgaggttgggagtttgagaccagcctgaccaacatggagaaaccctatttctactaaaaatacaaaattagcctggcatggtggcacatgcctataatcccagctacttgggaggctgaggaaggagaatcgcttgaatccgggaggcagaggttgcagtgagcagagattgcaccattgcactccaacctgggcaacgagagtgaaactccatctcaaaaaaaacaaaaagccattcctggcctggcgcaatggctcacgcctgtaatcccaacactttgggattacgcttgccaaagtaagtgaattacctgaggtcaggagtttgacaccagcctggccaacatggtgaaaccccgtctctactaaaaatacacaattagctggacatgatggcaggcgcctgtaatcccagttactcaggaggctgagggaggagaacctcttgaacccaggaggcaggggttgcagtgagccaagattgcgccattgcactccagccagggcaacaagagtgaaactccgtctcaaaaaataaataaataaataaataaataataaccattatgttatcccatgatggcagctctttctgtataaggtaataaatatgcgatgtaaagagtgtatttcatattaatgcactgattgttgtaccttttttttttttttttttttttttttgagacagggtcttgctctgtcacccaggctggagtgcagtggcgcaatctcgactcacttcaacctctgcctcccaggttcaagcaatccttctgcctcagcctcctgagtagctgggatcacaggtgcccgccaccacgcccagctaatttttgtacttttttagtagagacggggttttgcctgttgcccaggctggtctcaaactcctgacctcaggtgatctgccctccctggcctcccaaagggctgggattacaggcacagggagccaccatgcccagctgtttttttgttttgttttttgttttttttgagacagagtctcactctgtcgcccaggctagagtgcagtggcttgatcttggctcactgcaacctcggttcactgaagcctcccagtttcaagccgtactcttacctcagccttctgagtagttgggattacaggcgtgagccactgtgcccagccttttgttttgtatttttagtagagatggggtttcaccatgttggccaggctggtcttgaactcctggccacaagtgatccacctgccttggcctcccaaagtgctgggattacaaggatgttagaaaatggctgggcctggtggcttacacctactcgggaaactgaggcacgagaatcgcttgaacccgggagacgggcattgcagtgagctgagatcaggccattgcactccagcctgggcgacagtcacaaaaaaaaaaaaaaagaaagaaagaaagaaagaaaacacatcaattccaggaaatacaaatcagatgagatcgggcgtgttcccggtggtatggtcacagaaacaggaagcacaaatcaatcacctccaccactgccctctccgggggaaaggatgaaatgtaatcaacttaccactaactagtcagtcattccccttaaaggacaatagcagatcaaggtgtcatcatgggcttttttttttttttttttgagacagggtctcgctctgtcgcccagcctagagtgcagtggcaccaccatagctcaaccttctgggctcaagcgatcctcctgccttagcctctggagtactaggactataggtgcatgcctccatgcctggctaattgaaaaattttttttgtagagacaggatttggcttttttacccagactcatctcaaactcctggcctcaagcgatcctcccgcctcggcctctcactggtactcttatcacaggcatgagccagcgtgtctggccctgatcacagccagaaactcccaggctgtgataatgagctcagctttcatgagagacagctcatgctattaggcacatccttcgtctcttctcctgctaccctgctaccgcgtctctgttcatgggtgcattatacaagcagtggtctgaggatagagcctcagtgatgcccactgcacaaggcaccctctcttcctggttgctcaggatcttctctgtggtgagcactccctggagaacattaacatgagacacagagatctcatgcctctgcctcttctcataattccttttttttttttgagagggagtctcaccgtgttgcccaggctggagggcaatggtgtgatctcagctcactgcaaccttcaccttccaggttcaagtgattctcctgcctcagcctcccaggtagctggggctacaagtgtgtgtcaccgcacccggctaatttttgtgtctttagtagagacggggtttcaccatgttggccaggctggtctggaactcctgacctcaggtgatctgcctgcctcagcctcccatagtgctgggattacaggtgtgagccactgtgcccagtgcccccccttttttgtgtgtgtcagggtctcactctgtcacccaggctagagtgcaggggcataatctcggctcactgcaacatctgcctccaaggctcaagtggtcctcccacctcagcctcctgagtaacagggactacaggcacgtgccaccaaacccagctaattttttgtatttttggtacagacgagacttcaccatgttgcccaggctggtcacaaactcctgacctcaagcgatccaccagccttggcttcccaaaatgctgggaatacagacgtgagccaccgtgactggccccagctaatttttgtatttttagtagagatgggttttcaccatgttggctaggctggtctcacactcctcacctcaggtgatccacctgcctctgcctcccacagtgctgggattacaggcataagccaccacgccccaccgtgagacccccatctctacaaaaaaagttttaattagctgtgcatggtggcaggcaccctagtcccagctacctactgaggaggctgatcgcttgagcccaggaggtcaaggctgcagtgagctgggatcacagcactgcactccagcctgggagacagagggagactctatctccaaaaagaaaaaaagactagagattgtgccccaggcacagatcatattaatcccagtgatattctgggagtggtggccagactccttcccaggactggtcttccggtttggcaatgagtgttagtcaaggcgtgaggttctcatgggccgtctcaagcactctgttcgacatctttttactctctcccaggctggggtgcagtggcgtcatcttggcttactgtagcctccgcctccagggttcaagcaattctggtgcctcagcctcccgagtagctgggattataggcgcctgccatcacgcctggctaattttttttgtatttctagtagagtcagggtttcactatgttgcccaggctggtcttgaactcctgacctcaggtgatctgcctgcctcgacctcccaaagtgctggggttgactgctcgtggcccctctgttgcacatcttgacttctcagcctccaaggtgattctttaggacaccaatttaatccctctaaacatggcaacagagccagcggtttccagccctatttgcgcagtagaaggattatttacaaatcctcgtacttagactccacccgcagagattcaagtggactgagcctggagtgaagccgaaggcattttcttataatcctgagaatgataatatacagctgtctttgaaaaccaccactaagacttgtaaactttgttcattcaagtcttcttttctccccttaaaagcaggcttatccttgaggtgtgctttttcagactccagtaagcatcactgagaacacttaattaatatactgaggcctctcacaagagggaaggagtggaagaactcctggagaaggacttggaagggagagatgtttttctttctttctttcttttttttttttttggagacagagttcactcttattgcccaggctggagtgcaatggcgtgatcttggctcactgcaacctctgcctcccaggttcaagcaattctcctgcctcagcctccccagtagctgggatcacaggcgcctaccaccatgcccagctaatttttgtacttttttagcagagacgggctgtcgccacgttggcctggctggtctcgaactcctgacctcaggtgatccgcccacctcggcctcccaaagtgctgggagtacagacatgagccaccgtgcccagccaagatgtttttcttaacacaaaaagtttttgtctgggtgtggtggctcacgcctgtactcccagcactttgggaggccgaggcggggagatcacttgcaatcaggagttcgagaccagcctggccaacgtggcaaatacaaaaattacctgggcatggtggcgcttgcctgtaatcccagttatttaggaggctgaggcaggagaattgcttgaatccgggaggcggaggttgcagtgagctgagatcaagccactgaactccagcctgggcgacagagtaagactccatctcaaaaataaaaaaaaatttctaaagcaagcgcttgggctgttctgatgtcaacatacagtagctggccctacctttaacccaggataaggggcaaaagtatacccaaagatacatgtaatcaaagttgctgggtgcagtggcccacgcctataatcccagtgatttgggaggctgaggtgggaggattacttgatcctggaggttgagaccagcctgggtaacacagtgagaccttgtctctgaaacctaaaataaaataaaataaaataccactgtgctctatcctgagcaacagagcaagaccctgtctcaaatataataaaaataaaaataatcagtccttgggtttagcatctttggactaatggtaccagcatgagggaaagcaggtctttgtagctctgataagtgaactttgacacttcttagtgtttttctctaactgtggtgacatacgaataacatataattaaccatttaaaaataagcggttcggtggcatttagtacatcacagtgttgtgcaaccaccacctctaggtagttccaaaactttttctttctgtttttttttttgagacagagtttcgctcttcttgcccgggcaggagggcaatgacacgatctccactcaccgccacctctgcctcccaggttcaaatgattgtcctgcctcagcttcccgagtagctgggattacaggcatgtgccaccgcacccggctaattttgtatttttagtagagatgaggtttctccatgttggccaggctggtctcaaattcctgacctcaggtgatccacccgcctcggcctctcaagtgctgggattacagatgtgagccaccatgcctggccccaaaacactttcctaactctaaaataaagtcccataagcaggtattccccactccctcctcctcccggcctgtccatccacaaatgaatggattaaacaatatggtttatccatacaatggagtataattcagctgtaaaaggggcttggcgcagtggctcacaccagtaatctcagcactttgggaggccgaggcgggcagatcacttgaggccaggagtttgagaccagcctggccaacatggtgaaaccaggtctctactaaaaatacgaaaattagccaggcgtgttagtgcacacctgtaatcccacctactcaggagactgaggcatgagaatcacttgaatttaggaggcagagaagttgcagtgagctgagatcctgccactgcactccagcctgggcaacagagcaagactctgtctcaaaaaaaaaaaaaaaaaagaggaatgagataccgacacattataccatgaggataaaccttgaaaacaacatgctcagtaaaagaagccagcacacaaaaggttacatattatataatgtaattttattttagtttttgaaaagctggtctcctgggctcaagcgatcctcccttcttggcctcccaaactgctgggattacaggtgtgagccactgtgtccggcctatgattttttttttttaatgaaatacctggaaaagataaatccagagaaacagacggcagattacaggctctttttaaattggtttctgacactatcacaagataaaaatgtggtttaaaattgttgcttggtatgtcttattcacctctaaagatatactgttcatcaggccgggtgcagtggctcacacctgtaatcccagcactttgggaggctgaggcgggaggatggcttgaacccaggagttctaggctgtaatgtgctctgccaattgggcatccacactaagttcggcatcaatatggtgacctcccaccaggttgcctaagaagtggggaaatggtctaggttgaaaatggagcaggtcaaaattttcatgctggctgggcacagtggctcacacatgtaatcccagcactttgggaggccaaggcagatggatcacctgaggtcaggagtttgagaccagtctggccaacatggtgaaaccctgtctctactaaaaatacaaaaaaaaaaattagctgggcatggtggcatgtgcctataatcccagctatttgggaggctgaggcaggagagttgcttgaacccaggaggcagaggttgcagtgagccgggatcacgccactgcactctaacctgggcgacagagtgagactccatctcaaaaaaaaaaaaaaaaactttcatgctgatcagtagtggaatcagcttgtgaattgccctccagcctgagcaacacagactgcctcttactaatcccagcactttgggaggctgaggtgggaggatggcttgtgcctaagactttgagactagcctagccaaaatcccttctctacaaaaaatgcaaaaattagctgggtatggtagtgtgcacctgtagtcccagttactcaggaggcttaggtgagaggctcacctaggcccaggaggttaaggctgcattgagctatgattttgccactgcactccaggctgggcctaggcctttgtagtcacagctacttgggggcaaatgtaggaggatcacttgagcccagtaggtcgaggctgcagtcagctgtgttttttgagacatagcaagaccctgtctcaaaaagaaaaaaaaaagtagctacaagctcatttatgcaaaggctaaccactgtcacaagtagagatgtgcagaactgagattcaaatggatggaatggcaagaaaaactgccacttctgtgaacctgaagtcaaactgcccttgtcgtcaagataaaaggtatacatggtgtgagcctgggcatctgaaaggtgttgcagctttttcttttatttttttgagatggagtctcactcctgtcacccaggctggagtgcagtggtgcgatctcagctcactgcaacctctgcctcctgggttcaagcaattctcctgcctcagcctcctgagtagctgggattacaggtgcccaccaccacacccagctaattttcgtatttttagtagagatggggtttcgccatgttggccaggctggtctcgaactcctgacctcaggtgatccgcctgcctcagcctcccaaagtgctgggattacaggtgtgagccacctgtaattagccaggcttggtggtgggtgcctgtaatcccagctactgggaaggctgaggcaggagaattgcttgaacctgagaggcggaggttgctgtgagccgagatcgtgccactgcactccagcctgggtgacagagtgagactccatctctaaataaataaataaataaataaaatgagatgatttctgagtgagttaactaaatcaggatatgcagaacaatgccaagcatatattagccactaaagaatatataagttgcctgaaagcccctttagggtttaaacctggacttcattattcacaatcacattcccggtccccattacggagcctggtcacctgggtgcttgttagatatggaaatcatcagatcccaccccagaccgagtcagaaacgttgagggcaggagttcaagaccagcctggccaacatggcggaaactccgtctctactaaaaatacaaaaattagtcaggagtggtggcacaggcctgtgatctcagctactcgggaggctgagacatgagaatcccttgaacctgggaggcagaggctgcagtgagccaagatggtgtcattgcgctccagcctgggtgacagagtgggactctgtctcaaagaaaaagaaaaaaagaaaagaaattgcagcttctgctcaggaagtctggagtgggccaggattctgcattttaacaactcccaggagtgttagtggggctggtttgtggactcgcctttgagtcgttggtctccgctcaatcaatattagataaaatgacagtattgggagaaatccagggggctctggaggaccgagggatcatattggaggcagatagggcagagaaaggtggaggaggtgggagtcgggtgtggctgtggaggaagctacttaaatccggatttgatctttgctagttcttatccctggacctgaacccaggcgcacatctggattagaagatgccaggctcagaggatcttcgtaaaggtaagccagaaaaaatgagaaccgaagcaaagacacgtgaagaagtggaaagcagctggcggcgggaaaaggcagagggaccaggcggccgaagctggtgcttcgtccacgtgggtggcagggacttcccacagaggctgtcatcgtttttgttgttgttgttttgttttgttttgtttgtcttttgagacagtctcactctgtcgctcaggctggagtgcagtggcacgatttcggctcactgcaacctccacctcccaggttcaagcaattctcctgcctcagcctcccgagtagctgggatgacaggcacacgccaccacacctggctaattttttttttttttgtatttttagtagagccgggggtttcaccatattgaccaggctggtctcgaactcctgaccttgtgatccgtctggctcagcctcccaaagtgctggggtgacaggcgtgagccactgcacccggcccaagttttgtatctttatagagatggggtttcaccatgttagctaggttggtctcaagcccctgacctcatgtgattggctggcctcggcctcccaaagtgctgggattacaggcatgagcctcggtgcccggccgcggctgtcatctgacagcacaggcaaatgcagggaagcctgtttctgccttcaaatccgaaatcttctccctcgtagttgtgtcctaattcttcccaccccgatgcttgttcttgagcacaggggaatctgattcctatgaggatgattaggtcctagatagaatataggcttagccaagctggaaatctcatgttcatgagcacttactagactctggagctgctgccaaaccattttcaggcatgatgcgattcagatcttttagagcgaggcatgcggtggctcatgcctgtaatcccagcactttgggaggccgaggtgggcagatcgcttcagcccaggagttcaagaccagcctgggcaacaaaacaagacgttgtctctacaaaaaatacaaaaattagccgggcatgtcagtgttgtgtagttccagctactcgggaggctgaggtgagaggatcgcttgagcctggggaggttgaggctgaagtgagctgtgatcatgccactgggcaacacagcagtacactgtctcaagaaaaagaaagtaaaaggtgacatccgtgacagcagtgatgttatttttctgcttatttccttgctatattcctaaaagaatatacttaatgaacattgaataaatgataagaataaaaccatgtccatccatttcaccttggattgagttgcctatttctacacaaagaaaatagaacccaagaggtaaggcacaagcgatcccttatttacgtatttatttatttatttatttattattttcttgagacagggtctccctctgtctcaggctggagtgcagtggcataatctcggctcaccacagcctctgcctctgaggttcaagcgattctcctgcctcagcctcccgagtagctgggactacaggcgtgcaccatcacgcccagctaatttttgtacttttagtagagacagggtttcaccatgttagccagaatggtcttgatctcttgacctcatgatccgcccgccttggcctcccaaagtgctgggattacaggcatgagccactgtgcccggccaaatttttgtgtttttaatagagatggggtttcaccatgctggccaggctggtctcaaactcatgacctgatatgatctgcccgccctggcctcccaaagtgctgggattacaggcgtgagcaagggatcccatatttaaatgataacagaaaaaaaggatggaggaaccaagggggaaaggaacaaccttttcctatgaaaatgacaaatgaggcttggaaaaacaaggacaaaaggcagatcaagttgtcctcccgcttcagcctcccacagtactgggactgcagcctgaggcacgaccccggccagcagtgtctccatatctaagaacctcagtcacggccgggcacagtggctcacgcatgtaatcccaacactttgggaggccgaggcgggtggatcacctgaggtcaggagttcgagaccagcctagccaacatggtgaaaccctgtctctgctagaaatacaaaaattatccgggcatggtggcgtgcgcctgtaatcccagctactcgggaggctgaggcaggagaatcgcttgaactcaggaggtggaggttgcagtgagctgagattgtgccactgcactccagcctcggtgacagaacctcagtcacttgatcatcacgttgtacctcagtggaaaggaaaggaaagctcaggcttttgagaatggagttgttagcatttcccatttgtgtctttttcctcctctttcaaggcaaggaccagatgcattcacacaggaaacgaaccatgttcactaagaagcaactggaagatctgaacatcttgttcaatgagaacccatacccaaaccccagccttcagaaagaaatggcctcgaaaatagacatacacccaacagtactgcaggttggaaaatgatccctcttctcactaaactgccttcctgatctaatctaaattcagagtccctctaggataattcctgaggtctcattccaatcgccaatattccccaaacccacactctcctactcacgtccccgtaaacctttcttcaaccccctagagcaagaatgggaaaatttttccagtaaaggaccaggtagtaaataattgaagctttgtgggccataccgtctctctagcaactattttaactatgccaccacagtgcgaaggcagccacagacaacgtaaacaagaggcccatctgtgttcccagaaactcttttactcaggttggagcacggtggtgcaatcacagctcactgcagcctcgacctcccgggctcaagcaatcctaccacctcagcaccccaagtagctgggactacaggtctacaggtgcacactacgcctcccaaagtgttgggattacaagcatgagcccggctgtattttattttttgtagagatggggtttcgctatattgcccaggaggctgatcttgaactcctggtctcaagtgattcacctgccttggcctcccaaagtgtcaggattataggcataagccactgcgcctggcctgaagtttatacaattttcacattacaaaatagtgttgttttgttttgttttaagacagggtgttgctcttgcccacattggagtgcagtggcacgatcatagctcactgcagctttgaattcctgggctgaagccatcctcccactcagattcccaagtaggtgggactacaggtgtgtggtactacagcctcccgagcagctgatactactggtgtgtaccaccaggcccagccaatttgtgtgttttttgtagagatggggtttcgtcatgttgcccaggctggactcaaactcctgaaatcaagtgatccacccacctcagcctcccagagtcctgggattataggcatgagccactgtgcctggccagtagtattcttttattttctctcttttttctttcagtcccaacacacatacaacacaaaatagtactcttattgtgtttgttttttctcaaccattttaaaacgtaaagcctattcttagtgcatgggtgatacaaagacagggggtggtcagatttggccaccagccttagctggctggcctgagccccagagcagcccctgcgactgatccccttgctctcctatcccctgctctgggttttctgacccctgtctcaatttctgtccccaaaatctctcatttctgctccttcctgggagtagattgagtagggttccacaaagaggatgtaagtggccaagctgtggcactagctgttctcacctagaagtactcatattatcaactaaaaggaaaacttgggttgggtatggtggctcatgcctgtaatcccagcagtttgggaggccgaggtgggcggatcatgaggtcaggagttcgagaccagcctggccaatatggtgaaaccctgtctgtactaaaaatacaaaaattagccaggcatagtggtgtgagcctgtagtccccgctactcaggaggctgaggcagaagcatcgcttgaacctgggaggcggaggttgcagtgagccgagatggtgccactgaactccagcctgggcgacaaggtgagactccatctcaaaaataaaataaaataaaataaaaataaataaataaataaatattaggagagtttaagggccaaaaaaaggaaaaaaaaagaaaagttaaaaacttaaaggttaaaaaaaagaatataaataaataaaatacgtttaacaaaataaaaattaaaaagtaaaaattttttaaaaatagaatgacaagtcatctgaattccaccccattctcttctctctcttcccttcaggtctggttcaagaatcacagagcaaaactcaagaaagcgaaatgcaagcatattcatcaaaaacaagaaactccacaaccgccaataccagagggtggggtctccaccagtgtcggcctgagaaatgcagacacactacccagattgcccaacgctgctcacccgatcggcctggtgtacacgggtcatcgagtcccctcattccagctcatcctgtaccccaacctcaaggtccctgcaaatgacttcattggccacagaatagtccattttggctgctgccgagatcctaatatatactgcctctaccccattttggaatcccaagtttgcgctccaagcttccattctggctctcctgcctgttcatctaaccaaagtcgagagagatgataaatacaaaaagtcacatgttgtaatgatgtgtgtgtggtactgtgacatttgcgtttggtcttcgtgcctgtttcctggaaagcagctccagagttccatggagtctccaaagtgccatctttttgtattttgtgtgctaatgttgaccgatagcttcaggatggggactggtctctggaaagaccccagtaggattagagggcaaacttctgggaggggaaggaagctgagggtgaggctgatcaccattggccagtggtttcatcagtcatgtctgggtaaggaagcatccatcaaaacccaggaggacagggtttgaagagatccctgacagctaagcatgcggacgtacctggagggtggcatatccggggagggcatggaagctccgggcccctcgtcatacgcctcatcctagcagggtgcggtggctcatgcctctaatcccagcacgttgggaggccaaggcaggcggatcacctgaggtcaggagtttgggaccagcctggccagcatggcgaagcccatctctactaaaagtacaaaaattagccgggcgtggtggcttgtgcctgtaatcccagctactcgggaggctgaggcaggaggatggcgtgaacccgggaggcagaggttgcagtgagctgaggggattgtgccactgcattccagcctgggtgacagagcaagaatctgtctcaaaaaaaagaaacaagaaagcacagaggaccagctggaatatttggaagaccagaaaatgtccttaaaactcaaaatgcctgggcatataggtcaggtccacctagccttttgaatcaatgcgaacccttcctcaaggcctggaggttggcaacacaaaatcaccctgtggagaacctaaagcattccctctctgagagttgagtcaattgggattccacccccaaaattcctaaaaatctcaagttcctagaaaattctcagaaaaagcaagctctcctatacctccctggctgtactctgatgcaacttggcaaccatcagagaatctccatccccttgaaccttggtcctctgccaatgttcctcacgcctgtaatcccagcactttgggaggctgaggcgggcggatggcttgagcccaggagttcgagaccagcctggccagcatggtaaaacctcatctctaccaaaaacatcaaaattagccagtctcatatactggtctcaaaataaataaatagattaaaatttaaacataaaataaacatgagtgtgttagaaagaacctactggcccggcgtggtggctcacacctgtaatcccagcactttgggaggcagaggcaggcggatcatctgaggttgggagttcgagaccagcccgaccaacatggagaaaccccgtctttactaaaaatacaaaattagccaggcatggtggcgcatgcctgtaatcccagctactggggaggctgaggcaggagaattgcttgaacccgggaaggggaggttgccatgagccgagattgcgccattgcactccaagcctcctgggcaagaagagcaaaactccatctcaaaaaaaaaaaaaaaaaaaaggaacctactgtaggatttggagttgagtaatttcagatagaatcaaaggaagagaaaggtctggattgggtggtgccagcggcagcttctatgactgagtatctcaatacatcttatctataggacggctgactagaaagaggacaaacctataatagataaatgggcggcagccattgcttagccataggcgaatatttgatgggttggggctcaggacaaatgttaaaaacaatcttaataacagcatgccggcccggcggcccacacctgtaatcccaggggatttcagaggtggagggggaggcggaaggattgcttgagcccaggaggttgaggctgcagtgagctgtgattgcaccgctgcactccagcctgggtggcagagcgagcccctatatcaaaacaaacattatcaagaaaaattattaaatgaataacaaaaacaggctgggcacggtggctcacgcctgtaatccaagtactttgggaggctgaggcaggtggattgcttcaactcaggagtttgagaccagcctaggcaacacggtgaaaccctgtccctacaaaaacacaaagaaggagtctcgctttgtcgcccaggctggagtacagtggtgtgatctcggctcactgcaacctcctccatctcctgggttcaagtgattctcctgcctcagcctcccaagtagctgggactacaggcatgcaccagcacacctggctaatttttgtatttttagtagagatggggtttcatcatgttggccaggctggtctcaaactcctgacctcaggtgatccacctgcttcagcctcccaaagtgctggaattacaggcttgagccaccatgcccagcctctacaattaattaaaaaagaaccataaccccaaaacttgtacaaccaccagtccaagaaaccaagtcacaatttctgcagcaatcagccccaaatgcccagggcttgatccatcactcgtagcttccctagtttttgtgcccatcccccaaccttgatttcaatttaggaccaaccagagaaacccaatgtttggctaaacaatcccacaggatcctacttctggttagctccctggcggcctcccaacgtcagcagcctttggtcaggacatatctgaagacttcgttttttttctgctataaagctttctttccttttttttttttctcctgaggtgaagtctaactctgtctcccaggctggaatgtagtggcatgatctcggctcactgcaacctccgcctccctggttcaagcgagtctcacacctcagcctcctgagtagctgagattacaggcatgcaccaccacacctggctaatttttatggtgtttttttttgtttgtttttttgtttctttttgtagagacggggtttcaccatgttgcccaggctggtctcgaactcctaacctcaaatgttctgcccaactcggcctcccaaagtgctgggataacaggcgtgagccactgcgcctggccatggaacctcactctttaaagtgtgcagggaccccagtcattccccactgtgtcgcggttcccataacagtgcctgtcaccaagtatgttttcaaaatacatttttggaagagagagagaaacagaaggggagggggtaggaagagaaagtaggggaagaggaaagtgagagagggagacaggaagggagagggaagggagacacagagatgaagacaaagggaaagagacagaggccgggtacagtggctcatgcctgtaatcccagcactttgggaggccgaggtggcggatcacctgaggtcagcagttccagaccagcctggccaacatggtgaaacccccgtctctaccaaaaatacaaaaattatctgggagtgatggtgtgtgcctgtaatcccagctactcgggaggctgaggcaagagaatcacttgaacctgggaggtggaggttgtggtgagccgagatcgcacccttgaactccatcctgggcaacagaacgaggctctatctcaaaaaaaaaaaaaaaaacagaaagaaaagaaaagaaaaggaacagcttccaagcatctttggagaagggcttcactaacatcaaatcctgtcttcctctcatcaccttctagcccagtatttccccaacgtgagaataataagaatcatctggggagctgttaaaacccagactctgagaccagacaggggcatgcttcccaggtgtgggcatgatttttccctggggttgtatttaacaaagttcaaaacccaggaggtacaatcaaaacctgagccgtctggagactcaagacttcttagggaagacgaaaaagagaaattccggccaggtgcagtggctctcgcccgtaatcccagcactttgggagtccaaggcaggaggatcgcgtgatcccaggagttggagaccagcctggccaacatggtgagaccctcatctctacaaaaaaaaaaaaaaaaaaagagagagagagagaaagaagttcccagagaaagttcccagaggaaacaggagggaaaagggcgaggactgcacccagccagctagggtatgagtgtgaaccatagtctagggggctgggtgtgaattcccagtccaggggctgtgaatacgtggagacaccgatgctggccctgcacccagcctcctccctgggcgaactattgactgaagccacccctcgtgtccccactgttcctggtctcaacttcctcacctgatgaatgggcggggagggtaattcccctacggtggggcttttctcactctgttatgtgttcttacaaaatgtgctctctgatatcatctatatctccctagaaggaatcattagtttatctttttttttttttgtgggacagggtttcactctggtcgcccaggccggagtgcagtggtgcgatctcggctcactgtaacctccacctcctgggttcaagcgattctcccacctcagtctcccaaggcctggtgcggtggcttacgcctgtaatcccagcactttgggaggccaaggtgggcggatcacttggggtcaggagtttgagaccagcctggccaatatggtgaaactccctctttactaataatacaaaaattggccaggcgtggtggcgggcaggtgtaatcccagctactcggaaggctgaggcaggagaattgcttgaacccagaaggcggaggttgcagtgagccgagatcgtgccactgcactccagcctggggacagagtgaaactgtgtctcaaataataataataataataataataataatttaggccaggtgcagtggctcacgcctgtaaacccagcactttgggaggccgaggcgggtggatcacgaggtcaggagttcaagaccagcctggctaacatggtgaaaccccatctcaactaaatatacaaaaaaattagccgggcgtggtggcacatgcctgtaatcccagctacttgggaggctgaagcaggagaatcgcttgaacccaggagggggaggttgcagtgagccaagaccgtgctactgcactccagcctggcaacagagcaagactccgtctcaaataataataataataataatttaaaaaaaaaataaaaaataagaaataaaagaatgaaccacaatgtccctttgttctacaggccactcttgtgctatccacagttgccaaaaacccccacctgccttgtctatggacgcccatcgggtgataccacaaacacctttgatcctacagataccagggtaaattcagcatccaagtccttgaattcttcccgtgagtataagctgccctggctcagccctcttctttgccaggaacccaatccttcaaacttccctcaaagactgggtacttttagcatgactgctctagagattctgggtggggctcaaagtttaaccttcagggtcagcaacattttatggaaagagccacagagtaaatatttgaaacattctcgtacactgacactcagctggactggcaaagcagaatatctgtgtgtcagtgtgcgttttattcagccgttgtttgggtcagggtctgtgggcggcccctggcagctaatgccctcctgtgaggaacaatacctcaccatcaagcacagtccgtcacatattcttgccctggtcgctcgctctttctttcttttctttctcttctttctttcctttctttctcattttcgtttctttctttctttccttcttttctttttctttctgtctctctttatctatttctgtttctttctctctctctcacctttctttctttccttccttccttctttctcttcctttctttctctatctctctttctttctttccttccttctttccttgtttccttctttcttttcttttctttctttttctttctttcttttctttctttctctctctctctttccttttctttctctctctctctctctctttctctctttctttctttctgacagggtcttgctgtgtcacccaggctggaatgccaagatgcactcataggtcactgcagcccaaataaatttccccaggctcaggtgatcctcccacctcacccttccaagtagctaggaccaacaggtacatgccaccatgcacgtctaatttttatttttattttttgagactggtcttgctctgtcacccaggctggaatgcagtggcacgatcacagctcactgcagcctcgacaacccggcccctccaagcaatctcccccctcaccctcccaagtagctgggacctcaggcatgtaccaccatgccctgctaattttttattgtttgtagaggcggggtctccctatgttgcgcagggtggtcttgaacacctggcctcaagcaatcctcctgccttggccacccaaaatgctgggatcatgggcgtgagccactgtgcctggtctggtcttcctcctttcatcctcttagtccttgacctgtccctcttctagagtcctccctcttcatgaccctctcccccttgttggggctcagaaactgatacctctaaatacagcatgttaaaggtgcctcaagggccgggtgcagtggctcatgcctgtaatcccagcactttgggaggccgaggcaggcagatcacttgaggtcaggagttcaaggccagaccgaccaacatgcaaaaccctgtctctactaaaaatatggaaaaagaaaattagttgggtgctgtgacacacgcctgtaatcccagctacttgggaggctgaggcaggagaatctgggaggcggaggttgcagtgagccgaggtcacaccactgcactccagcctgggcaacagagcgagactctgtctcaaaaaataataagaaataaataaatgagcctcaaggtctctgacctcccccgatcatctcttccaaagcacaggcctttatctgtgtaagatccagacctgccaagaggaataattgttttttcttctcctccctgtgagacaaagaatgtaaccacacctgaacagatcccatcactgtcaataggaatgatttccaggacccattcatgctctctagtaatcctttattgccctcaatggaattcctctagccccctcccataatcagtttgccaggagaacatataagcttctgaacccccttgggggatgggcgatcactggctctccccatgctcaggttaaagacatttgtaagccttttctcctgctaatctgcttcctatcagttcttttcagccaaccttcagagagccaaaggcagccttcaccttggcctcaacaccttccatgccttttgcttctcctcctcccctgcaaagcattccccactccttgggttccccactttcaagcatcccaccctccctgttatatgtcatcctcctcattctctgcttttataacccttttaaaattatgggcccagccaggtgcagtgatgcatgcctgtaatcccagctctttgggaggctgaggcaggcagttcacttgagctcaggagtcctacacagctggggcaacatggtgagacccccatctctaccaaattgcaaatattagccgggtgtggtggtgtgagcctgtattcccagctactcaggaggctgaggtaggagaatggtttgaccccaggagatggaagatgtagtgagccaagatcacgacactgcactccagcctgggcaacagagcaagatcgagcctaaaaaaaaaaaaattaggtggggtgcggtggctcacacctgtaatcccagcactttgggaggtcgaggcaggtggaacacctgaggtcaggagtttgagaccagcctggccaacatggcaaaaccccatctctactaaaaatacaaaaaaattagctgagtgtggtggcgggtgcctgtaatcctggctacttgggaggctgaggcaggagaatcacttcaacctgggagccagaagttgcagtgatctgagataatgccattgcactccagcctgggtgatagagtgagactctatgtcaaaaaaaaaatacataaaaaaattaaaaattaaaaatcaatttaaaaaatgccagctagtatacttttcctctctcccttcctttttctatctctctctctttttttttttttttttttttttttttttttttttgagacagtttcactcttgtcgcccaggctggagtgcaatggcgtggggatcttggctcactgcaacctccacctcctacactcaaatgatccttctgccttagcctcctaagtagctgggattacagatacaagcaacaaatcctaattcttgtatttttcgtagaggcagggttttgccatgttctccaggctggtctcaaagcgaatgctggccaggctcatttttttaatttgaattgtgggaaaactgaggctggatcgaatggtcctggacatgccctggaacaaacaacatttagctgtgcaaggcacagtgtcagtgtctggtattggggtgccccagtctcaagtcccaagaaaaagacaaggcagaccatgaattttgtgtggctccaactcagttttcttcatctgttgcttcacttgcagtgccagaccagaatcactttgacctaaaactagctacgataattaacattcagtatgactcattacctaacaaattcaaaatgtaaggaactgtctttagaacttgttctatataaacatgttattaaggtctgctgcggctgttctatgcagctcttttttttttttttctggcgataggatctcactctatcgcccaagctggagagcagtggcatgatcacagctcactgcagcctcaacctcctgggctcaagcaatcctcccacctcagcctcccaaagtgctgggactacaggcgtgcacccctgcacccaactagttttgtattttttgtagagatggagtgtcactatgttgcccaggctggtctccaactcctggcctcaagcaatccaccaactcggcctcccaagtgctgggattacaggcggacgccactgctcccagccccagatttttttctcatttatatttccgcaaacctcaaaaaaacccccaaaggtccctaggtcagtcacttcccactagtaaataagtcagcatctttgcaaagatcaaaggaaaagcaattttccttaccacagagcctcttacaggaaagagagctctgattttccatatgttccccaaccatgctaggatgttcctgtgccctgatggcattcttactaacccattgttccattcctttccagccctccttcctgtaacgtaagtgcaggtgggagttggggattggtccgctaactgggtatagagaaaacagatgggtatgctattctcagtaagggagcttctgtcctgggaaaaatgtggcctctcctaaggaaccctatcccattgaatcaccctgattcactttttttttttttttttttttttttttttgagatggagtcttgctctgttgcctaggctggagtgcaatggtgtgatctcggctcactgcaacctctgtctcccggttctagtgattctcctgcctcagcctcccaagtagctgggactataggcatacaccaccaagcctggctaattttttttttttttttttttttttttgagacggagtcttactctgtgccaggctggagtatagtggcgtgatcccggcccgctggctcactgtaacctccgcctcctggattcaagtgattttcttgcctcagcctcttgaatagctgggactataggcgcccaccaccacacccagctaatttttgtatttttagtagaaacaggttttcaccatgttggccaggatggtctcgatctcttgacctcgtgatccacacgccttggcctcccaaagttctgggattacaggcgtgagccactgcgcccggccctaatttttgtgtttttagtagagatggggttttgccatgttggccaggctggtctggaactcctggccttaggtgatctgcccacattggtcttccaaagtggcgagattacaggcaagagccactgtgccctgcctctcacattttctctcttcccagatttggttcaagaacttaagagctaggccatgtgcggtggctcacgcctgtaatcctagcactttgagaggccaaggcaggcagatcgcttgaactcaagagttccagaccaccctgggcaacatggtgagatccctgactacaaaaattcgccaggtgtggtggcatgtgtctgtagtccctgctattcaggaagctgaggcaggcggatcgcttcagcctgggaggtcaagactgcagtgagctgagatggagacacagcactccagcctgagcgacagagccagaccctgcctcaagaaaacaaaacaaaacgataacactggagagccagagcaggaaccagtctcctctccaatctccaaacctgagagagacatgagtcacactgacggctttgcctgcctgcgatctctctatgtgtgttgattcttgcggaacaaggcgcttcgagcatctcctctgcccctacgcccgtgaccctgtccctcttcttgtctccattgccccccaagcgggtacatttgcccaccttctcacctgggacaccctgggcgtggatctcctcacctgcagcgctaggtgtgctcccagggtctccacatccctaacccccgcaaggctggcctctttacctgcaaagccccccgccgcggcctcctccctctaccataccccaatgccaggctcacttcctgccgcctgcctggaacggggctgctcatgcatcccccacgccctctgaagcccccccggcgcactccacgccctctcgcctgacccctgtttccgctgccggcgtctccacaccccctgacgccgccacgccctggaccgaggtctctagagctgcgcgccggctgcacgtcccttaggagtttccgtgcgccacgaggcgctggcgcgcgtctcccggcccatccaccccgggcccggcgacacctttctttgccacctggaaccaacatcttggttcccttttgagggatcagaacttgtttaattggaatacggcaaaattctgaatttttctgccgtctctattccaacttcagagttctgccgtccagccctgcgacaatcttccggtgccaacgcggcaggtcagtatgtatcccccacgatgccccccgggccacgggcccctagttaacaggtttccctttcgcccgctgcctggaagtatcgccacctcgccccgcccaaccccccaccagacagctctgcagccacagcccctcatccaaccaggaagtccagggcccatctggcccgctagacctcgggaaaccacggcgtcagagcacccattaagaggggtccaggccgggcgcggtggttcgcatcagggcgcccattaagaggggtccaggctgggcacggtggttcccatcagggcgcccattaagaggggtccaggccgggcgcggtggttcgcatcagggcgcccattaagaggggtccaggctgggcacggtggttcccatcagggcgcccattaagaggggtccaggctgggcacggtggttcccatcagggcacccattaagaggggtccaggccgggcgcggtcgttcgcattagagcacccattaagaggggtccaggctgggcacggtggttcccatcagggcgcccattaagaggggtccaggccgggcgcggtggttcgcatcagggcgcccattaagaggggtccaggctgggcacggtggttcccatcagggcgcccattaagaggggtccaggctgggcacggtggttcccatcagggcacccattaagaggggtccaggccgggcgcggtcgttcgcattagagcacccattaagaggggtccaggctgggcacggtggttcccatcagggcgcccattaagaggggtccaggctgggcacggtggttcgcatcagagcacccgttaagaggggtccaggctgggcacggtagttcgcatcggagcaccagttaagagggatgcaggccgggcacggtggctctaatccgagcactttgggaggatcacccgaggtgaggagttcgagaacagcctggccaacgtggtgaaaccccgtctttacggaaaaatacaaaatttatcagggcgtggtggcgggcgcctgtaatcccagctattcgggaggctgaggtgggagaatcggttgaacgcgggaggcggaggttgcagtgagccagtgagccgagattgtgccgctgcacttccagcctgggcggcagagtgggactccgtcttggggaaaaaaagggtagtccaggccgggcgtggtggctcaggcctgcaattccagcactggaggaggccgcggcaggaggatcgcttgagaccaggagttaagagacctgcctgggcaatatagtgagacccctgtgtttgtttgtttgttgagacccttgtgttaaagcaaactaaatatggcctgagaaggactccgtaattctatatttgagtccttgtggatgaactgcaacctaacttaataggtacaaaagattgaaaacctaagttaggccctgcgtggtggctcacgcctgtaatcccagcactttgggaggccgaggcgcgcgaatcacctgaggtcgggactttgagactagcctgaccaacatggagaaaccccgtctcttctaaaaatacgaaattagccagacgtggtgactcatgcctgtaatcccagctactcgggaggccgaggcgggaggatagcttgaacccggaaggcggaggttgcaatgagccgagattgcgccattgcacactctagcctggtcaacaagagcgggaaactccatatcaaaaaaaaaaaaaaggaagcctaacttacgttttatgcgcctgtaaccgccactgagtgttggccaatcccagcagcccagcagctgtacttcatccactcacaggctgctgagcattcaaactgtgttcaaataaggcaaacgctgagcggtaaccaatccagctctttctgtacctcacttccgatttctgtatgtcactttccttttcttgtccataaatttgttctgaccacgaggcacccctggagtccgtctgaatctgccgtgactttcggagctgcccgatttgcaagaggttcattgttcagttgaactcctttacatttatttattttatgtattttattttatttattttatgtattttattttattttatgtattttgttattttattttattttatttattttatttttattttgtttcatttttatttttattttattttatttttattttcatttttttgagacggagtctcgctctgtggcccaggcgggagtgcaatggcaccatctctgcgcactgcaacctccgcctcctaattcaagtgattctcccgcctcagccttacgagtagctggtattacaggtgcccaccaccacacctggttaattttttctgtttttagtagagatggggattcaccacgttggcccggctggtcttgaactcctgacctcaagtgatctgcccacctcagcctcccaaagtgctgggattacaggtgtgagccactgtacctggccccctttaaatttaattcggctgaagtttttcttttaacagatggtgtcagaagcggagtccagagtagagcttctaggaaccttcgggagtgctgagtgaacacgcaaggtgcctgcggaacccacttgtgtccattgacctctccgagtggccggggatcgtgggtaagttccctctcggatttcagagctccacagatttgtgttttgagctctccgagtttcattgagcaaatatctgatccaaactgggtttggaagctgtgacagaaactggactggttctgggaatggatctgatgtggtaattagctggcttggacccagttagaggcctcttacatgtgactgggtcagaaagaaactggtagcaaatggtaatattgcaggaggtgtaaaatttggcttttaaaaattaacagggatgtttgtgttctacccctttgtttcatttttcttgtgcacttaggtattaaaaaaaaaattactgggtaagttaatcaagggaacctgagagtaatgaatgccaatattttaggtaaaaatgggatctttttttttttttttttgagatgaagtctcgtttggtcgcccaggctagagtgcagtggcgcgatctcggctcactgcaagctccacctcccaggttcacgccattctactgcctcagcctccccagtagctgggactacaggcgcccgccaccacgcccggctaattttttttttttgtattttcagtagagacggggtttcactgtgatggccaggatggtcttgatctcctgacctcgtgatctgcccgcctcggcctcccaaagtgctgggattacaggcatgagccaccacgccctgccaaaaatgggatccttaaattctgaaaaactgagttccttctggcttatacattaggcacgggaaggagcaaagacttacagaaatggcaaaatctgcctgagcgtggtggctcacgcctgtaatcccagcactttgggaggctaaggtgggtggatcacctgagctcaggagttcgaaaccagcctggccaacatggtgaaacccatctctactaaaaagacaaaaattagtggggcgtggtagcttgtgcctgtagtcccagctacttatgaggctgaggcacgagaattgcttgaacccaggaggcggagtttgcagtgagtggagattgcaccactgtactccaacctgggtgacagagcgagactctgtctcaaaaaataaaaatggctgggcgcagtggctcacgcctataatcccagcactttagaaggccaaggcaggtggatcacctgaggtcgggagtttgagaccagcctggccaacatggtgaaactctgtctctactaaaaatacaaaaaattagccaggtgtggtggcatgcacctgtaatcccagctacttgggaggctgaggcgggagaatcttgaacccaggaggctgaggttgcagtgagccaaggttgctccattgcactccagcctgggcaacaggagcgaaacactgtctcgaaaataaataaataaataaataaaaattaaaaaattaaaatgagggctcccgaaagttaaatctgctaatctttcagcttcgttactatcctgatccaaaggaagcagactgcagcaccagttggctgactttggataagtaatggggtccattttacctgagtaaagtatgggatggggtcagaggccctcccctcagtaaagtcccccttggttaaaaatgggttaaagatgacagggcccagctggggtcaagtttgagccttgcgagttcagtattgggtgctaagcacagtggccagtgtctgtgttttgtcacgtattttgctttggcgccatgatgaaaaaatgttaattggcttaccccacgcaaccccttcggccacacttgcaaaactaagaggcttttgcttaaggttccataaaacagaaaaagaatttcctttgtgatgccgcaggcttggccctcaggactatagtgtggcaagcagagtcactaggaccacctgggcaaagggaacctagaagcctggcatgctggcaaaaggtaaagtatttcttaccaattagactgtggcccctctgtgcaaactggttagatgaacggtaaaaatcactgtttatctcctctgtaatgctttgattaatacaaaaaagaattctgaggttggtcttaggaagctgtaataaatctggtatgctttgtgtctttctgtattctgtcacgaagaggggtaccttcggatgaaatgcgtgcccagggccgcataagcccgctgttcaagacggcccagcaaactggtcaatcatgtccttggaagcttaacctcctaataccatgtggccctgctttctcttttcacaacggcaggccaggttcagggttccattcccggcttactcagcgagtactttctggtgtcacctttaccatgtgttgattctcttccctctgtttcttatagaacacagaaatattagctgtttggcctagccaaggttgggtaataaaagatttaaaaggactttttaaaacaagcgctatagttaaaactcaggtacattaaaagtggatatttggccaggcatcgtggctcatgcttgtaatcccagtacttggggaggctgaggcaggtggatcacttgaggtcaggaattcaagacaagcctgggcaacatggcataactctatctctactaaaaaaaaaaaattagctgggcatgttggtgcacgcctgtaatcccagctattcaggaaggcgggaaaattgcttgaacccggcaggcggagcttgcagtgagccaagatttcaccactgcgctccggcctgggtgacagagcgagactccgtctcaaaaaataaaaataaaataaaaataaaataaaataaaataaataaaataaaagtgtagtgctcgcttcagcagcacatatactaaaattggaatgctacagagaagattagcatggcccctgcacaaggatgacatgcaaattcatgaagcgttccatattttgtgcatcctggcaagatcatttctgtatctgctaactagcactaaagaaatagtgtgaatctaagcaaaaatgagtggcacccaaaaacaaaattgtggttttcattaaaaaatataaatatttatataataaaatatatatgatatataaaaaataaaatatgtataataaaatatacataatatatataaaataaaaaagtatataaaaaatatatatgtgtgtgtatattcaaattcttttttttttttttgagacggagtttcactcttgtcacccaggctggagtccaatggcacgatctcggcttaccgcaacctccacctcctgggttcaagtgactctcctgcctcagcctcccgagtagttgggattacaggcacctgccaccacgcccagctaatttttgtatccttagtagagacagggtctcgccatgtaggccaggctggtctgaactcctgaccttgggtgatccacccgcctcggcctcccaaagtgctgggattacaggtatgagccaccgtgcccggcaatgtatatattcaaattctaacagcctgggactccttgggaaaaacaggaggcaccagagacgccattttggaaaaaaacctgttttcctcatggaaccacaggaattggaaatggatagattccccttcagaaatctaaggctctgttctttttgggattcaggatctggtataaaaatgggacccttaatttttggagacctgtgttgctttctgctgtgcccacttattatattgggccctagaaactgcatgctttcctggtcctttttgtccaaggactccaccctaaagccagtaatctcaaataaataaataaacacctaaatcaaatattttgaaagaacaataaaaactaatgccttttagttcacataactttagtaatctttgggaaataaaaagttttaaagattattgggaaaaatgaagacatttagtctaaattaggcaggtcagatattaggtttgttcgatgctttaaggtcatcaactgcttcttaggcttttgaaaattgttcagtttacctacttgggagcattagattctagataaggcctgggaacatgtggaattagccatgcactctatctatgcaaaggttataaagaaaagagattttttttttaattaacaaaaaccacaggtggttgtgctccgcctacccagcacagcaggtgagatggtgcaccctcagtggactgaagaggccatgggatcccacctcagccggatagcacgctggccttcaccttcattgtgccatggcagctttcgtgtgagccactgactcgtgtacatgttagactccttggtctataagaaagcatcttgtatggtaaattgttgttctaaagtaaaataactggtttgttcaaaaaggggatgctaaggagaagtcagaaagtcaaagcatgttgtagatggtctgggaaagtcgtgaaagggttcgtgaaaggaaatttaagccaccaaaagtaaaagttgctagttaccattataacatatgattgaaactactgaaaaaatagttttacatggaaagtgtgtgagaagagtgaaacatgtttttggtaaaatatttttaaaaggcaggagaatgtcaaatttcacctagttgagagggttatgtgatttttaaattagataagaataagctcacggtttgaacaagttgtggaaggtttgtaaaaactaatcttgcaaaaaaaattctgtgtgcaaacacgttgactaaatttaaaggggtattttccagttttccataaattaaacattgaaatgaaaggacaaacagggtttctttttttgtttttttgttgcccaggctatgggcaactatgtagctaggcatgttggtgcatgcctgtaatcccagctactcaggaagctgaggcaggaaaattgcttgaacccaagaggcagaggttgcagtgagccaagatcgcaccactgcattccagcctgggtgacagagcaagaccctatctcgaaaaaaaagaaaaaagaaaagcaatagctccctgggtgtcaggtatcagtgagaatgggaagtcaggtcttctctgactcctaggacattcctctctctgtctttgggggttgaattccttgttagaactccatcttgttaaaggggcctcgcacctgcccttgccttctgcagcagccctccttaatcctctccaaacttccatctccagaccaccggattctcctcatgagtgccctgggtggacattggtgaaaggtcactgccttcaggacacaccataggtacagtcaccgaggtaacccagttcaaagaagagcaggatgttcagtatttacaaagggatctagcaattggtccaaaccagtcagtgctggcatgcaccgttcatcgtgccatcagtggcaagatggagatctggcaatgcatggctcacagtaagatacacgccctgtgccattccaccctatcattagaaaaggagtcttctttttctttctttctttcttttttttttttttttggagacagggtctcactctgttgcccaggttgtagtgtaatggtgcaatcttggctcactgcagcctctgcctcctggggtcaagtgatcctctcacctcagcctcctgagtggctgagatcacagatgccagccaccacgcctggctaatatttttgtttgtttgtgttatgttttttgagactgagtcttgctctgttgcacaggctggagtgcaatggcgcaatctcggctcactgcaacctccacctccctggtacaagcaattctcctgtctcagcctctcaagtagctgggattacaggcgcctgccactacgcccgcctaatttttgtatttttagtagagacgaggttttgccatgttggccaggaatggccagacctcaaatgatctgcccgcctaggcttcccaaagcgctgggattacaggtgtgagccactgcacccagccaatttttgtatttttttttttttttttttttgtagagacagggttttgccgtgttgcccaggctgatctcgaactcctgacctcaggtgatcaccttccttggcctcccaaagtgttgggattacaggtgggagccaccatgtccagccgctttttctttttaaaaaaaattttttttgacataacagacaacaccactctcttttatttttttatagagacggggtctcattatgttgaccagtctggtctttttaaattttatttttttgagatggagtctcactctgttgcccaggctggagtgtagtggcgggatcttggctcactgcaacgtctgtaccccagattcaagtgagtctcctgcctcaggcttccaagtagctgggattacaggctcatgccacatcgctggctaattttttttttttgtatgtttttaaattttatcttttaagtagagacagggtttccccatgttggccaggctggtcctgaactcctgacttcaggtgatccaccctcctcaacctcccaaagtgctgggattacaggcatgagccaccatacccagccttcctgctatttttgaactacctgtaccaggctggtttctctgggtgaggggagtggtcaggcagaggcaggccccgtcatggtaagcagctaggagactgctagagattgacagggcactcatgagtgccctgggtggacactggtgaaaggtcactgccttcaggacacaccataggtacagtcaccaaggtaacccagttcaaagtagagcaggatgttgggtatttacaaaggagatctagcaattggtccaaaccagtcagtgctggcatgtaccgttcatcgtgccatcagtggcaagatggagatctggcaatgcatgggctcacagtaagatacacgccctgtgccattccgtagacgtagatcaagcgattattactgcagaaatctccgtggacgtagagcaagcaattattactgcagaaattgcaggagcaggttctgcagcatgtcacatccaaagaagcttcccttgcaagttggtaaccttgagggcttcaataccacacagagttggtctaggtgatggctgaccatccaggcataataatttggggaacaattccaggatggaggttatgttgctagacttgtttgtccgggaaagtggtagacaggaagttcctgtctgcacacgtctcctggctccagccctttcccctgtccatctgtcctacagactccgcctcaggcatgttgtcttggaggacgtgcagaaaggcagccatgcactttctaggtttcgatgccgtcttagagtcactggtcaccaggtctgggtcaaacgggagtctctggctgtcaagactggactgggaggaatcacatcgcttcttcaccatcagctttatctgctttgccttttccgacttcagctttctctgcagggggtatcagtggggttgacaaagattgacatctttttgttatcctcatccctaatcttgccactgacattcttcagtgcctaggcgatgctggcattctccacaaagatgtgggcctgcattttctcatagcgaaactgaatcaggaggaaggggcattgcattgactctgaatcaaattcagcagccacttctcattttatgcagatcttgaactagcagctccctaaggtccgatctggcctgtttccctctgttcttttctctggaggtttttggcgctttctctgtgttaacatgggtttggtcttgtttatggcaagtgcctctccatggctgggtgcggtggctcacgcctgtaatcgcagcactttgggaggccaaggctggcgaatcaccagaggtcagttcgagaccagcctagccaacatggcgaaaccccgtctctactaaaaatataaaaaaattagccaggtatggtggcgggcgcctgtggtcccagctactcaggaggctgaggcaggagaatcgcttgaacccgggaggcggaggttgcagtgagctgaaattgtgccattgcactccagcttgggtgacagagtgagactctgtttaaaaaaaaaaaaagtaagtaaataaataaatgttgatattatgtagccatgttatgtagttttgcatagcctttctctgtcttatagctatgaaagacaatttccaaaacatagcctagaatggagaattgaagataaagtgagaactgttgggcatagtaacctaaaaagggatcccctctggtgtggaaagattgttccaacgcaaaagggactgagatccagagatggcagttgtttgagatctggaatcttcagaagaggtagatcagacttgctcaggaaataatgggtcctaccatcacagcgggtacggatggggctacaagatgagagaggctggataggagagtatttaaggaaaaaaaaaagacagaaaaggaccaaaggacagtctgtgagaccccagagaatgcattaaacctgaagaatttctgaacaatgacgtctgatattcaggcttccgttgtttctttttgtgctgtaatcttccgtgttttctctgcacatagctcagtaaagctctattcaccagttaacctagagtctgtcttgagataagcagggagggctgtgacggctgcacaagggcggagtggtttgtagacctgaaaaggaacttgtaagagctggcagatcttaaccaggagagggagcccctttccacagcctagaagcttctgaagtcatttaaatggaactgaattatatgaagtcaaatgtcagttggggaaaaagtcaaactttattatttatttatttatttgtaattgtgcgtatacatatatatatatatatatatatatatatatatatatatatatataattttttttaaattatgatctccgtgatagtaccaaatcaaactttttttggagacagagtcttgctctgtcacccaggctggagtgcagtggcgtgatctcggctcactgcaacctccgcctcccaggttcaagcaattctcctgcctcagcctcctgaagagctgggattacaggcgcgtgccaccatgcccggctaatttttgtatttttagtagagatagggtttcaccatgttggccaggctggtcttgaactcctgacctcaggtgatccacccgccttggcctcctaaagtgttggaattactggcatgagcgaccacgctggcccaaaccctgctttttactggagagacgaggtagccctaagttaaaaaaaaaaaaaaaaagaccctgtttcacttcttttggatatacccggggtgacattgctagatcattctgcaattcctccttttttttttttttttttttgctgggggtgggatagagtctcactcccaggctggagtgcaatggtgtgatcttggctcactgcaacctccgcctcctgggctcaaacgactctcctgcagtgaggagctgggattacaggtgcctgccaccacaacctgctaattttttttttattttttgtatttttagtacagacggggtttcactatgttggccaggctggtcttgaactcctgaccccgtgatccgcccgccacagcctctcaaagtgctgggatgacaggcatgagcctccgcgcccagtagatcattctgtaattctgtgtttaactttttcccccctaaacttaactgaagtgatatttaactttctgaggaatcaccaaatcaaaggtgacttttgagacaaatacaggaagtggaggtggttttcctcatgtagatgaagacattctaaacccagaactgaaaacacacatggaatccttttaagtatcaggatgccttggtggacaaaatggatacatccaacttctcaaggagcttaatattcagtattaaagctgaggtgagctcaggtgattcacgcctgtaatcccaacattttgggaggccaaggcaggcggatcacttgagcccaggagtttaagaccagcctgggcaacatagtgagacccctcccccctgcccccgtctctacaaaaaataaaaaaattacagacgcatggtgtagtcccagctacttggcagtcaaaggtagaaggactgtttgaacccaggagtgggttgaagctgcagtgagccttgattgtaccagtaaactttagcttgggaggcagttgagaccctgtctcaaaaaaaaaaagaaaggaagaatttctctctcccaacttcccttggtttctcctcgccccccggctaaaaagtgattggggaccttttaaaaaacttcctgctctccacagaatgggattacagccccgagatgatccataaaagattttcaggaagaatgaagagtttagggagtgaaggttctaaaacagtaaatagagtgtcacaaagaaatccattcatctctttgaaggctgggtatttggaaaaagagagaaagaaagcttcattcagagagcgctcgcctgtatttaggggtgtttggagggggcggggtgactatagaattagggtaaagttcagtgtcttgcaaatcagccctgaaatagccctgatccctgcaggcctgtctggtttcccaaaccctccactagctttcaaatttgcattaaaaagcttttggcttgttcattctgttctttctttcttttctttcttttatttatttattttttttgagacggagtctggcactgtcacccagactggagtgcaatggcgcgatctccgctcactgcagcctctacctcccgggttcaagcaattctcctgcctcagcctcccgagtagctgggattacaggcgcccaccgccacacctggcttatttttttaatttttaatagagatggggtttctccatgttggccaagctgttctcaaacttctgacctggtgatccacctgcctcagcctcccaaagtgctgggattacaggcgtgagccactgcgccaggccctcattctgttacttctttctttcttttttcattaatttaagttctgggatacacatgcgggatgtgcaggtttgctacataggtaaatgcgtgccgtggtggtttgctgaacctattgacctaggtattaagcctcacagccattagctatttgtcctgatgcccttctgcctcctgcccattctttgttatttcttcatattccaattaatgttcattttgaggacctggctctggccaggcaaggttccagtctggagtcaaactgaggaaagtattacctttcacaaacacttagaccacgttgggaggggagaatgattgtcctccacatgcgtatgggtgtgttataaaccccaggaaggtaaatactaagcaaaggcgtgcacagataattattgcaactgatgattccacgtcaattgtactgtactgtgagtaggtttataggctgccgtgacaggggccatcacctgggtacgagggtgctggcttcctcttgaagacgtgactttaaaattgtgagttgaatagatgcaaggatattggcccagtggaggaactttgaggggagggggcagggtatcctggttgggaggaaattacatacagaaattggggagtggtgacaacattgactcttccagtaattgtctgggtgtggtaactcaggactgtaatcccagcactttgggaggctgagatgggaggattgcttgagcttgggagttccagatcagcctaggtaacacgaggagatctaaaattgaaaaaaaacgtagctgggtgtggtggctcattcctataatcccaacaactttgactcaggaggctgaagtgggaggatcccttaaggtcaggaggttgaggctgaagtgagctagcactttgggaggccgaggtatgtggattacttgaggccaggagttcgagaccaggctggctaacatggtgaaaccccatctctactaaaaataaaaaaattagccaggcatggtggtgcgcgcctgtaatcccagtgactcgggaggctgaggcaggtgaatcacttgacccctggaggcagaggctgcagtgagccaagatcataccactgcactctagcctggacaaccagagtgaaactctgtctcaaaaaaacaataataattttaaaaaaattttttaaataaaaaaattaacaaatgacccgcacatctggggtgaagtaagacgaggctggcagcatagctctgtcacctgtggttaggattaattaagctcagctttaaaggctggatcttggcctcctgggttttaattttgacttctccacttctcagccatgttttgttttgttttgtttgcttgaggagggacaaatcaggccagcattgagcctctttcccccgtgtgtcaactgagattgataattacaagattaaatgatgcttgtctgtgattttagcatctgttcagcccatcattcatttcaagagtattgactgggcttcagggtaggttccatgttagtactggggacgccgtgggtgggagggagactgggtctccaccctcctagagttatagtctaggcctgcggttaagcagatttttgtgcaggaatcaaacccactacactacctgtcagaaatcaagccctgttccaggcactgggaaactcagaatttaaaggggatgtaccaggtctctgtccttgcggagcattatcgatcagtagaagagagaaaataaacaagcaaacacctgagacaattgtaatagcaataatgtgatatcaataaaatgaaacagagcaacagaaatagggtagatgggccgggcgcggtggctcacccctgtaatcccagcactttgggaggccgaggtgggcggatcacgaggtcaggagatcgagaccatcctggctaacacggtgaaaccccgtctctactaaaaatacaaaacattagccgggcgtggtggcgggcgcccgtagtcccagctactcgggaggctgaggcaggagaatggcgtgaagccgggaggcggagcttgcagtgagccgagatggcgccactgcactcaagcctgggcaacagagtgagactgtctcaacaaaaaaagaaaagaaaagaaacagagtagatggtcttagaaatgacaaggaatcccaatgagaggttctacctgggacaaaatagaaaaatgggaaatcataataagctctggaattggggcagtggtattgtttatttcctagttgtggcaaatctaatgtaaaatatggacattaaagaaaactgggtggagaacatagagaactttctgtactttttgcaacttttctgtaagtctaaatttattcgaaggccgggcgcagaggctcctgcctgtaatcccaaaacgttaggaggctgaagcaggtagatcacttgagcttggtagtttgagaccagcctgggcaaaaaagtgagacttcatctccattaaaaatttaaaaaattagctggctttgctggtgagcacctgcaccagactggttagcctgggcagcatagtgagaccccgtttctataaataagataaaaatcagctgggtgccaggcgtgatggctcatgcctgtaatcccagtgcttcgggaggccgaggggggcggatcacctgaggtcgagagtttgagaccagcctgaccaacatggagaaaccccgtctctactaaaagtacaaaaattagctgggcgtggtggcacgcgcctgtaattccaggtactagggaggctgaggcaggagaatcacttgaacctgggaggcggaggttgcagtgagctgagatcactccactgccccccagcatggctacagagcaagactccgtagcgggatattgcatgcatgtaatcccagctactctggagactgaggcaggagaatcatttgaacctggggggcggaggtcacagtgagccaagatcatgctattccagcctgggtgacagagtgagactacctctcaaaaaaaaaaaaaagaaaaagaaaaagaaaaagaaatgcatttacagaagctaggaaaatcaaattcagggaggaggctggagggcaaagagtgggtgtggccagactttaatccattctccatctgtggggtggtccctagggtataaaagagctccagggcccctgccctgcctttcatcctcaggatgggaagtcctcacagagttcagtaagtattggcttcccatggtgtttctgcacttcccccggggtcatatgagcctcacatttaggttgtaagactccccctaaaatctccaacactgagtcctctctatttgtagtcatgactccgacaccttgattctctgcccctaatactctttttttttttttgagacggagtttcactcttgttgcccaggctgcagtgcagtggtgtgatcttggctcactgcaacctctgcctcccggattcaagcaattctcctgcctcagcctcccgagtagctgggattacaggcatgcaccaccatgcccagttgattgtttttgtatttttagtagaggtggggtttcaccatgttggccaggtctcagactccaagcctcgagtcatccgccctcttcagcctcccaaagtgctgggtttacaggtgtgagccaccattcctggaccgcattattgattttttaaaatttttggattttgttcaattagtgattgagtctcactgtgttgcccagatgggcttgtctcccaggctggagtgcagtggtgagatcgtgactcacagtagcctcaacctccctcaccccagcgtcccgtgtagttgggatggcaggcatacaggaccatgcttagctaatttttttttttttttgtagggttggggtctcccaccattgtctaggctggtcatcaacacctgggcacaaacatcctctcaccccggcctctgagccactgcacccagtaggttttaggttcattttattttttatttaggtgtccacaaaggcagctttttccttttctttattttttaaagagacagggtctcactctgttgcccagggtggagtgcagtggccagatcttggctctctgcaacctctgccttccagactcaagtgatccaccttcgtctccagagtagctgggactataggtgtgcacaaacacacccagctgagttttaaatcttttgtagagaagggggcctcagtatgtttcccaggctggttttgaagtcctgtgctcaagcaatccttctgccttggcttcccaaactgctaggattacaggtgagccaccacaccgggcctgtccacgtaatttaaaaggtgctggacgtgtgcggtggctcacgtctgtaatcccagcactttgggaggctgaggtgggcggatcacgaggtcaggagttcgagaccagcctggccaatatggtgaaaccctgtctctactaaaaatacaaaaattagccaggtgtggtggcaggcgcctgtaatcccagcttctcaggaggctgaggcaggagaattgcttgaacccaggaggcggaggctgcagtgagctgatgatcgctccatggcactccagcctgggcaacagagcaagactaagaaaaaaaaagaaagaaaaagaaaaagaaaacaaagtaatgtaaaaggtgttattcaggctggggacccccaaagtgctgggattacaggcatgagccccagggcaggcctaggatttgcattacaaggctctgcattgttcctgagaactggagagagtgctcaatctacctttcgctattgagcaacattcagaagtcagttttaaatctcttatcttctgcatagaggatgtgcctgcagtttccaggtactggacaatacagggagggtacttctcagtctgtggcactcagccttgagggcactttctggtgccagaatgaaagtgctgtcatagctgaggtccaatgactgaggcgagcaccgaagaaacaccatgggggggagggggggcggggggctccaggagccactgcaggtaaaagctaaaccgtggtgcttgttctgcgccataaactggacttcagcccagctttaaggaaatgaccacggtctctgggttgtgaggctgggttccgtagcagctataatgcttggattcagggatagcctgggtcacaccattgccagagaagaggcaaccaatccagaccccaaaagcgggttcttggatctcttgctggaaagaatttcgaggcaagtcacaacacagcgaaagaagcaagctgaggcctgggctcaatcctcctgcttcgtcctcccaaagtgctgggattacacgcatgatcccctgtgccctgccaatatttggtaattataactggtggtcagcttacaatgtggctatttccagaccataagtaccaactctataggtgccttgtgagtgagtgccttgctacttcaagcagttactttcgtgtgttattaaaccagaggcctgctaagcctctgtgcctagtaaagattacaatttggaatgtcagcccccagctgtcctgtgtgattggcaggttaggtccttgttgaaccagaagcaactggccagtcgtacagatgcaactttcggaccagtagaaaatttctatgtcaacctggagacatagggattgtacctttctgataccctattagtaaataaatagtatttatttataaattatgtataatagtatttatctgaatatatcccaagcagcccaagtgtgttccagacataacatttttatttacatttaaatatcactaagattagagatacacatctaactcaggttttcaactagtcttaccattgaaagaactattgtggcaggacgcagtggcgcacgcctattatcctagcactttgggaggccgaggagggcggatcacaaggccaggagttcgagaccagcctggccagcatggtgaaaccccatctctactaaaaatacaaaaaaattagctgggcatgatggcacaggcttgcagtcccagctactcggtaggctgaggcaggagaactgcttgaacccggcagacggaggttgcagtgagccgagatcgcgccaccgaactccagtctgggcaacagagcaagacgcttgtcttaaaaaagagagagaaagaactacttgttctctgtaagccatgctggtttagccaaaatgctgcagttgtgtatggccagggacgttgaggctgcagtgagccgacggctgtgttgccgctctgcagtctgggggacagagcaagaacctgtctcaaaaaaacaagaagttagtgagacagacatgccgttctgttacttttccccttgctggttcaaagctaggtagttgccaattaaatgtaatcttgtagagcaaaaatgtttttcattttttgagacaggatctcactctattgcccagcctggagtgcagttgtgggaactcacagcaacctccacctcctgggtttaggcagttcttctgcatcagtctcccgagtagctgagactacaccggtgcccagagggcagtggccagatcttggctctctgcaacctctgccttccagattcaagtgagccacctccgcctcctgagtagctgggactataagtacgtaccaccatacccagttaatttttgcattttttgtagataagggggctaagtatgtttcccaggctggtttcgaagtcctgtgctcaagcaatccttctgccttggcttcccaaactgctaggattacaggtgagccaccacaccgggcctgtccacgtaatttaaaaggtgctggacgtgtgcggtggctcacgtctgtaatcccagcactttgggaggctgaggtgggcggatcatgaggtcgggagttcgagaccagcctggccaatatggtgaaaccctgtctctactaaaaatacaaaaattagccaggtgtggtggcaggcgcctgtaatcccagtttctcaggaggctgaggcaggagaattgcttgaacccaggaggcggaggctgcagtgagctgatgatcgcgccatggcactccagcctgggcaacagagcaagactaagaaaaaaaaaagagaaaaagaaaaagaaaacaaagtaatttaaaaggtgttattcaggctggggatccccaaagtgctgggattacaggcatgagccccagggcaggcctaggatttgcattacaaggctctgcattgttcctgagaactggagagaatgctcaatctacctttcactattgagcaacattcagaagtcagttttaaatctcttatcttctgcatagaggatgtgcctgcagtttccaggtactggacaatacagggagggtacttctcagtctgtggcactcagccttgagggcactttctggtgccagaatgaaagtgctgtcatagctgaggtccaatgactgaggcgagcaccgaaaaaacaccatgggggggagggggggcggggggctccaggagccactgcaggtaaaagctaaaccgtggtgcttgttctgcgccataaactggacttcagcccagctttaaggaaatgaccagggtctctgggttgtgaggctgggttccgtagcagctataatgcttggattcagggatagcctgggtcacaccattgccagagaagaggcaaccaatccagaccccaaaagcgggttcttggatctcttgctggaaagaatttcgaggcaagtcacaacacaatgaaagaagcaagctgaggccgggcgcggtggctcacgcctgtaatcccagcactttgggaggctgaggtggatggatcacctgagatcactatttttctttttattttctgagatggagtttcactcttgttgcccaggctagagtgcaatggcacgatctcggctcacagcaacctctgcctcccgggttcaagccattctcctgcctcagcctccggagtagctgggattactggcatgcgccaccacgcccagctaattttgtatttttagtagagacggggtttctccatgttggtcagactggtctccaactcccaacctcaggtgatccgcccgtctcggcctcacaaagtgctaggattacaggcgtgagccaccgcacccagcctgttttctgcatttttagtagagacagagtttcactatgttggccaggctggtctcaaactcccgaccttgtgatctgcccgcctcggattcccaaagtgctgggattacaggcgtgagccaccgcgcccggccttatttttctttttttttttttgagacaggatcccactctattgcccagcctggagtgcagtgcagtgatctcagctcactgcaacctctgcctcccgggttcaagcaattctcctgcatcagccgcccaagtagctgagattacagccgtgcctggcttatgttttgtgtttttagtggagatggggtgccaccatgctggccaggctggtcttaaactcctgacctcagttgatcctcccacctcagtctcccaaagtgctgggattacaggtgtgagccaccgcgcccagcaagcataagattttttgacacatggaggatcacttgctggatgtgcactgagaagtaatgtgcccatttcccagccacactctcccaaaggcttttacaggcgctgtccccgtgaggtggtagaacagaatgtcagaattcaacacattccaacactgtcttctgttgagctgtaggaggactgcctgtggagggacatgggttctatgctaccttgcaggttttccctggggcttgtgatcactgtctccttggtgacatgcaatctgggagtgctttctggagtctgataagaacatactggcacattgcctgtgacgtgtgggacccaggcattttcagtgctgaggtgagtccttgattgtaactgatggggactggtatcttaactccaggttactgaagactaggaatttcttgccttacagtaaaattgcaaagaagagtagcataagaggtagatcagaagactgcagaatagattaacaaatgaatgcccaaatgaggatgctaaacttggatttgcatcaagaagacagatattggtcgggcgtggtggctcacgcctgtaatcccagcactttgggaggctgaggcgggtggatcatcctggctaacacggtgaaaccccgtctctactaaaaaaatacaaaaaaattagccgggcgtggtggcaggcgcctgtagtcccagctgctggggaggctgaggcaggagaatggcatgaacccaggaggcggagcttgtagtgagccgagatcgtgccactgcacttcaccctgggcgacagagcgagactctgtctcaaaaaaaaaaaggacaggtattaggatagttttgaagcccacttgctcctatcatggcattgaagcatcagtttgctgccaatcactccttcttctgtgttcatagacaggactgtggaaatgtacacttggattctttcacaggtaatgctgagaaatttaaaaccaaaaacggccgggtgccgtggctcctgcctgtaattctagcactttgggaggctgaggcgggcggatcacaaggtcaggagttcgagagcagcctggccaatatggtgaaaccccatctccactaaaaatacaaaaattagcctggcatagtggcgggcccctgaagtcccagctactcaggagactgagtagacgaggagaatggcttgaacatggggtgcagaggttgcagtgagctgagatcgcaccgctgcactccagcctgggcaacaagagtgaaactctgtctcaaaaaaaaaaaaaaatttgaaattaaagtgtatgattagagtgcatgattggttctgactggatgtgtaacatgtgcatagccttctcataaatcaaaggtttttatgtgaaacctaccactagtgatgtaactgaatttgtgtaaatgctggtgtgtctgccttttcctagcaactccctgggcagcctgaggattctttgaggttattttttttcaagatctggctgggagcttctgcatgagtgctgtgtgaacgtcctccatctgcagtgtgaggacagcgaaccctagtgtgagttaaccacgtaggaagagtttgaagtcagacatgacattcagactgaggtcctcaaaactgaggggcattttctgtggtttgaaaggaaagtgcacccagttttggggatgtcaattgtgaatcctcatcataacccatccccagtcccccatcgcattgcaccacatggatgcacccagtggactggcctttgcttttctattgtttctttttctctccactgcaatcagctttctcacgttgaatgcattccattttctaagcgctctcctaggcaaaaatccctctaatgcaaagcaaaaatgtctgttatgcaacattgttctgagaccccaggaattgcagttaacttggctccttagtatgtgcttcctaaggcgggtggggtggctcgcgcctgtagtcccagcactttgggaggcaggcgaggcacttgaaaccctgtctctactaaaaatacaaaaattagctggacatggtggcatgtgcctgtaatcccagctacttgggaggtgcagacaggagcatcgcttgaacccaggaggcagaggttgcagtgagccaagataatggcactgtactgcaacctgggtgacagagcgagactcaaaaaaaaaaaaaagtgcttcctgtgaaggtttcctttcccttctgccccccataccagtccatctatttagtagatgtcctggtttctacccaggatatcatggaccaggggttctgtcttccagccttgagtacaatggtgcgactatagctcactgcagtctcaacctcctgggctcaagtgatcatcctgcctcagcctccaagtagctggtattacagatgcacgtgcccccattcccagaggttcttaaatttatgacaaaaacccagaagcttggctgaagcagcttgttggggcccacccacagattttgtttggtgccatagacctgggttgggatctggggagccatttttcttagtctcaatgtaaatgtctaagcattttctttttttctttctttttttttttttgagacagggtttcgctcttgttgcctaaactggagtgcagtggcacaatctcggctcactgcaacctctgcctcctgggttcaagtgattctcctgcctcagcctcccaagtagctgggattacaggtgtgcaccaccatgcccggctaatttttttttatttttttattttttttattttttgagatggagtcttgctctgttgcccaggctggagtgcagtggtgtgatctcggatcactgcaagctccgcctccttgattcatgccattctcctgcctcagcctcccgactagctgggactacaggtgcccgccaccacgcccagctaatttttttgtatttttagtagagacggggtttcactgtgttagccagggtggtctcggtctcctgatctcgtgatctgcctgcctcggcctcccaaagtgctgggattacaggcttgagtcactgcccctggccaattttttgtatttttagtagaaatggagtttcaccatgtttcctgcctatctctctatgtatttagacagggtctcactatgttgcccaggttggtctcaaactcctggactcaagcaatcctcctgcctccaccttccaaagtgctgggactacaggcttgagccatcctgcctgaccatttgagagttttttttttttgagatggagtctctctctgtcacccatgctgtagtgcagtagtgtgatcttgcctcactgcgacctctgcctcccgggttcaagcaattctcctgcctcagcatccccagtagctgggattacaggcgcccgccactacacccagctaatttttgtatttttagtagagacagggtttcaccatgttggccaggctggtctcgaactcctgacctcaggtggtctgcccacctccgcctcgcaaagtgctgggataagaggcgtgagccaccgtgcctgtcttcaacaatgatttctaattgcattttatggtggtgattgaacataatgtactttggtccttctccattgtatgcctcgtgtattatgtgtctcataacgtctgtcccgtcctatgctatgtgtgcatttgaatgttggggagggttcagtagatgtccattgagttggtttgcaaacttatttgaaacttctacttacttctgcctaattctgcttattattgagagtggactgctctgggatgccttttgtttgcactctgatttcagatggaccctgagaatgctcaagccccaaaccctccttgggaagtgaagctcaggctgtgatttcaagccagggggcgtttttctataactggatgaaaagcacctccagagcttgaagctcacagtttgagagcaatcgtctaaggaagttgatggcaatgttaatagttttttaaacaagcatgaaatcagattcctgtgtttacttctggatgctgttgatccaggaaatgtacttagaaaattcattttaacggaaatagtcataagcgtcttggtaatttcatgaagctacagtgagtaaattgcctgagaatttccctgcctgaaaggtcttcaggagtgtaatttttttttaatatagcttatttaatacaaatagagatgcggtctcactcttgcctagactggtgtgcagtgtcatgttcacagctcactgcagcctctcaacctccggggctcaagcatcctcctgcctcagcctcccaaagtgctggaattacaggtgtcagccaccactccctactcatacttgtatatttctctttaaattctgttgaggttttatggcctagcctgtggtctatcctggagaatatttgtgtgcatgacaatgtgtatatatatatatatatatatatttttttttttttttcttttttttgagatggagtttcactcttgttgccctagctggagtacagtggcatgaatctcagctcactgcaacctccgcctcccgggttcaagcgattttcctgcctcagcctcccgagtagccgggattaccctccaccacacccggctaatttttgtatttttagtagaggtggggtttcgccatattgaccaaggtggtcttgaactcctgacctcaggagtcccgcctcggcctctcaaagtgctgagattacaggcgtgagctaccctgcccaggctgaccatgtatattcctaatttttgtacttttttttttttgagacggagattcactcttgtggcccaagctggagtgcaatggcatgatctcggctcactgcaacctctgcctcctgggttcaagcaattctcctgcctcggcctcccgagtagctgggattacaggtgtgcaccaccacgcctgactgacaatatatattcttaaacagctcagattccattttggatcctcccatcaggactggaacttaggtgtactggaacttaggtgaacacttggctcaaaattcattgctgttctctataaatctagccagttctcttggttaaatttaaggtatgtatagtagtcgctgctttttctttcgggggacaaaactcaggaggattgcttcttgattcataagggcaacctgttgagattttcacgcaaggaacccgagatgttcatttaatgggcttataatttgggattccagaacacatgcaaacagggcaaatgaatgtttggctgtatctttatttttgtgttcatttcagcctggtcaaggttttagaatccaaggaaaccaataaacacccagagtgctggagcaagactgtctcctgctgtgaccctcaagatggaagcagtttctgttgtctgaaaggaaagaaagtgcttcctttttgagggttactgtttgagaaaagcaaccttgaggttgatgctgatgtttgtaacacacctgcagagtatacttataatcagacttgggtgatgtgaggttttgtttttactccaagatgagggtctccacccaggctggaatgcagttgcccttccaacctagaactcctgggatgaactggtcctctatgcctcagcctgccgagtagctgggactataatataggggtgtgccgccatatttggtagatttttcaattttttgtagagatggggcctcaccctggccaggatggtctcaactcctgagctcaagcaatcctacaggtgtgagccaccgtgcccattttaaagatagttgacatgatcaagcatagtgggacacacagccccagctactgcagaggctggggtgggagagtctcttgatttcaatgctataccgtgcactaatgacacctttgaatagccactgcactccagcctgggccaacatagcaagatcccatctcttaaaaaaaaatacattacatggcacctggttccagagacaccatttgtgttggtcaaacaatggcctcctataaatttagtttaatgaatccaaaccatgtttccttcattaagagagtaaataagcctccaagtctatccagtctttttgagacagagcttggctcttgtcactcaggctagagtgcaatggtgcaatctcagctcactgcaacctctgcctcctgagttcaaggagttctctcacctcagcctcccaagtagctagaatgacaggcgcctgccaccatgaccagctaatttttgtgtttttactagagatggggtttcaccatgtcggtcaggctggtctcgaactcctgacctccgtgatccacccacctcagcctcccaaagtgccgggattacagacgagagccaccacgcccggcctgtccagtcttgttctgcagtccccaatggggattttttttttcctgttcatttgtctttttattttaatctacttgtccctgacactgaaaatttttccttcctaacagcttaccatcatttctcagaatagacctgcttcctctgtgagaagcttatagttgattcaaccctcaaccactaatgccaacaaccctagtgagttcttttgactacagctggaccatttatcctgtttcctgtgggtagcggttccaatgtaccattccaacaggcaaaacctcgcctctgaatacaggttgcttggcaagatctaaaatgtttgctgtgcctaatataaactattgtaaagaaaatccatctcaatcacagtgacaaatgtcacatgagacaaaaccacagatattttcgcaaaaatagggtcctttagaaccctagaagggtctctctagtaacaggtgggatgttcagcagctcttgttgttgccacagtgagcgatgcctgttcgtccagcccttaacacctcttactccatggaagttctgcctgcactgctttatagaacacctcttgggttgaggtagagttggaggggacctcagtgtcccttgctgatgggatgtgcactgcttagcaagcgcacggaggtggagtgcatgggctctgagtttttattgggtaaatgcagccgaaatgtagtgtgcatgaacaggtcaaaaaattgcacatttgatttaatttttaaattttagagatgggggtctcactgtgtcacccagactaaactgggctgtgctcctatgcgtaccctagtagctgggacttcaggtgaatattaacccatgcataggcaaggagagaggaaggctctgacagtctgtgatctcccctcactgcaacctccaccctctggactgggaacgtcagggcactgcaccgatgcaggcaggatgagccgaggggaaaggagagccaggcatcactggctggggacattttgggtttgatctggatggagcaggtgtctcctggagagagagcccctgggattttcactctgctccctggctgtcttagtcatggaatctgacaacagagactcctgcccagggccacttcatttggtttctggaccccagtggtccttcctgcctggacttaggatcttttggggaagtttgggatctggcagggcatctgcataatccatagaaatccctgagagtcacttcccttggctgacatctccatgttcctacccattaccttccaaaggagacccttaactgaattaccaaagggggcttcccagagcagggaaacccggttaactttctatttcaggtcaacagtatacttgagatgtacttgaactagaaatgattggttgtttaggtgtgggcatttgtttttcctaacttagtctccaagaaaaaaaattattgaggttttacagcctagcctgtggtctatcctgaagaatgttcgtgtgtgtgacaatgtacattctttttttccccccagctctgtcaaatcttactgaggagcttttacggcctagcctgtggtctgtcctggagggtatttgtgtgtacaacaatgtatattcttaaacattatcttagattccattttggatgttcccatcaggactgtgtgtttctgtgctggaactcaagtgaacactggctcaacatccttagaaatccagcccaattctcttggttaaagataaggtatgtgtggtaggcattgctttttctctttggggacaaaactcaggaggattgccccttgatgaacaaggctaacctgctaagcctttgaagcaaggaactggagatggtcctttcaggggtttatgttctggattccataaaacatgcaaacaggggcaatgaatgcaccttttttatttttatttttatttttttttgagatggagtcttactcttgccagtctggagtgcagtggcacgatctcggctcactgcaacttctgcctcctggttcaagtaattcccctgcctcagcctcccgagtagctgggactacaggtacatgccaccacaggcggcaaatggttgtatttttagtagagacggagtttcaccatgttggccaggatggtcgtggtctcttgaccagcctcccaaagtgttgggattccaggcgtgagccaccgcgcctggccaatgaatgcatctttatttttgtgttcattttaatctggtaaggtaaattccaacaaaaaacccagagttttggagtgagaagatctcatgcagtcattctccaaaagaaagcactttctgttgtctgaaagcagagtgccttcttttggagcgttactgtttgagaaaaaccacgttgaagttgatgctgatcttggtaacacatttgcagagcgtgcttatcatcagacttgcatgatgttggggttctgtttttgtttagtttttttgcaacacagggtctcttgcccaggctggagtgcggtgacacttccaacctagacctcttgggctcagttggtccctgcccccaccccctcccccttttttttctcttgagacagtctctctctgtggcccaggctggagtgcagtggtatgttctctgctcactgcaacctctgcctcccgagtagctggtattacaggcacatgccaccacgcctggctaatttttgtatttttagcagagacggagtttcatcatgatggccagattagtcttgaactcctgaccttaggtgatccacctgcctcggcctcgcaaagtgctgggattacaggcatgagccactgtgcctggcccacaacgtatattcttaaatatcatcttagattccattttggttgctcccatcgggactgtgtgtccctgtgctggaactcaagtgaacacatggctcaaaatccattgctgttctctagaaatccagcccaattctcttggttaaatataaggtatgtgtggtaggctttgctttttctctttggagacaatactcaggagggttgccccttcgtgaacaaggctaacctgctgagcctttgaagcaaggaactggagatggtccttttaggggtttatgttctggattccagaaaacatgcaaacagggacaatgaatgcatctttatttttgtgtccattttaacctggtaaggaaaattccaacaaaaacccagagttttggagcgagaagatctcatgcagtcattctccaaaagggagcactttctgtttgaaagaaaacaaagtgcctccttttagagtgttactgtttgagaaaaaccacgttgaagttgatgctgatcttggtaacgcatttgcagagcgtgcttatcatcagacttgcatgatgttggggttctgtttttgtttagtttttttgcaacacagggtttctgttgcccgggcaggagtgcggtggcgcttccaacctagacctcttaggctagttggtcccccctactttttttgttgtttttgttcttgagacagagtctcactatgtgggccaggcgggcaggcagtgacacattctctgctcactgcaacctcggcctcccaagtagctggtattataggcacgtgccaccacgcctggctaatttttgtatttttagcagagatggagtttcaccacattggccaggttagtcttgaactcctgacctcaggtgatctgcccgcctctgctttccaaagtggtgggattacaggcatgagccaccctgctcggactgcagggtgtttttttttttttttttaattattatttgtatttttttgtgctgccaaagcaagcacttgtgtgtaggaattttgtttgtttgtttgtttgtttgtttgagatggagtctcattcttgtcgcccaggctggagtgcagtggcatgatctcggctcactgcaacctacgccttccgggttcaagcgattctcctgcctcagcctcctgagtagctgggatttcaggtgcatgccgccaccccggctaatttttgtccttttggtagaatcggggttttgccatgttggtccggctggtctcaaactcctgacctcaactaatccacctgcctcggcctcccaaactgctgggattacaggcatgagccaccgcacccggtgaggagttatttttaatgtgagcaaacagtatattcttttttttttttttcatagacagggtctcaacaatatatgatgtatatttaatcatatagtcttatcatgtatataatgtagtcatatgtacaccaaaccctgttctacacacggagaatactcttgtatcactttgggtatttatttacttgtttctttctgtgtttttcttgtttgtttgtttgttttgttttgagacaaggtctagctttatcacccaggctggagtgcagtggtgccatgtcgacttactgcaacctccacctgccacctcagcctcctgagtacttgtctacaggtgcgcaccaccacacccagctaacttttctattttttgtgcataaggtttcaccatattacccatgctggttgagctcgaactcctgagctcaagtgatcctcctgccttgccctctttaagtgctgggtttattggtgtgagccaccacgccccacccatacttgtgtatttctgtatttattgaggagcttatacagcataccctgtggtctatcctgcaggatgtttgtgtgtgagacagtgtatattcttgaacatagtagattccattttggatgctcccatcgggactgtgtgtccctgtgctggaactcgagtgaacacttggctcaaaatccattgctgttctctagaaatccagctcaattctcatggttaaatataaggtatatgtggtaggcattgctttttctctttggggacagaactcaggaggattgccccttgatgaacaaggctaacctgctgattctttgaagcaaaggactggagatggtccttttaggggtttatgttctggattccagaaaacatgcaaacagggccaataaatgcatctttttgttttgttttgttttgtttttgagatggagtctcgttctgtcacccaggctggagtgcagtggcacaatcttggctcactgcaagctcagcctcctgggttcacgccattctcctgcctcagctttccaagtagctggggctacaggtgcccaccaccacgctaggctaattttttgtatttttagtagaggcggggtttcaccctgttagccaggatggtcttgatctcctgacctcgtgatctgcccgcctcggcctcccaaagtgctgggattacaggcatgagccactgcgcccggccccaataaatgcatctttatttttgtgtccatttaaacctggtcaaggaagattcccacaaaaaatccacggtgctggagcaagaggatctcaggctgtgaccctctaaagggaagcgctttctgtggtcagaaagaaaagcaagtgcttccttttagagggttaccgtttgggaaaagcaatgttgaagttgatgctgatcttggtaaaatatttgcagagcgtgcttatcatcagacttggatgatggtggggttttgcttttgttttgttgtattccaagacaaggtccctgttgcccaggctggagtgcggtgacacttcaacctacatttcttgggctccggtcgtttttgtttgtttgtttgtttgtttgacagggagtctcactgtgtgtctcagcaatgcagtggcactatcttggctcactgaaacctcagcctcctgagtagctgggatcacaggtgcgtgcaaccacgcccatctaatttttgtattttttgcattttcagtagagacggggtttcaccgtgttagccaggatggtctcgatcttctaacctcgtgatccgcccgcctcggcctcccaaagtgctgggattataggcgtgagccaccgcgcccggccgagaaactaatcttttgagatgaactctgagatgtggattttagcttgtttgcagccaccaccactctagttttggaagattttcatcaccccgaagaggcttatactcatttgcagtcagtacccacccacctcttccacccagaccgtggcaacgactccccatctctctagctctggatctgcctcttgtaggccggtcacgtagaccaatcttgtatgggtgtccagttgaggataatgggttggtcctggttgtctgcaatgtgaatcttaccactgaagggtggtccctggagggaagcaggaggctgggagaactgggcggaacatcctttgggaatggagtggggcgggcagaccctgatgtctgggaagctcacaagggtggaagaccccatcttcctccctgagaactgcaaggtgaccctcctggggcactggaaggagtgaaggcctctgggctgggaacgtcagggcactgcaccgatgcaggcaggatgagccgaggggaaaggagaagcaggcatcattctctggggacattttgggtttgatctggatggagcaggtgtcttctgggagagagagcccctgggattttcactctgctccctggctgtcttagtcatggaatctgacaacagagactcctgcccagggccacttcatttggtttctggagcccagtggtccttcctgcctggacttgggatcttttggggaagtttgggatctggctgggcgtctgcataatccatagaaatccctgagagtcacttcccttggctgacatctccatgttccttacccattaccttccaaaggagacccttatctgaattaccaaagggggcttcccagagcagggaaacctggttaaatttgtatttcagattaacagtatacttgagatgtacttgaagtagaaatgattggctgtgggtgtcggcatttgttttttctaattttaaatatgggaccatcatgaatttgggtgtcactttgtgcaggggacgtgggaatcgctgtcatttttttttttttttaacatatgctgccagagaaggcacttaggtggagaaattactcttcgtgtgagcattcagtatatagaacttccttttctgggggcagtgtcttatatatgatacacattttatcatatcatcttctatagataatataatgattaacacaaaacactcttctacacacacagaatactcttgtatcactttgggttttttttccttcgtgtgtgtgtgtgtgtgtgtgtgtgtgtgtgtgtgtgtgtgttatgagacaaggtctggctctgtcacccaggctgcagtgcagtgttgcagtcttggcccatgccccaccgcagcctctggaatagctgtctgcaggccaggcacggtagctcaggcatgtcgtctcagcactcttggagaccaaagcaggctaatcacctggagtcaggagtttgagaccagcctggccaagatggtgaaacctcatttctactaaaagtacaaaaattagccgggcgcggtggctcacgcctgtaatcccagctcttagggaggcagaggcaggaggatagcttgagcccaggagtttgagacctgcctgggcaatacagtgagaccctgttctccacaaaaagaaaagaaaaaaaagaaaaaaaaattttaaaaatgcaaaattaggtgggcatcgtggcacgtgcctgtaatcccaggtaccccagaggctgagacaggagaattgctggaaacctggaggcagagcttgcagtgagctgagatcacggccctgcactacagcctgggcaacaaagtgagacttgtttcaaaaaaaaaaaaaaaatttattgaggagcttttatggcctagcctgtgttctatcctggagaatgtgtgtacaacagtgtatattcttaaacatcatcttagattccattttggatgcttgcatggggactgtgtgtccctgtactgggacttatgtgaacacttggcttcaaatccattgctgttctctagaaatccagcccaattctcatggttaaatataaggtatgtgtggtaggcattgctttttctctttggggacagaactcaggaggattgtctcttgatgaacaaggctaacctgctgagcctttgaagcaaggaactggagatggtccttttaggggtttatattctggattccagaaaacatgcagagagagtcaataaatgtatctttatttttgtgtccattttaaccaggtgaggaaaattccgtcaaaaaacccagacttttggagcgagaagatctcatgcagtcattctccaaaagaaagcactttctgttgtctgaaagcagagtgccttcttttggagcgttactgtttgagaaaaaccacgttgaagttgatgctgatcttggtaacacatttgcagagcgtgcttatcatcagacttgcatgatgttggggttctgtttttgtttagttgttttgcatcatggggtctctgttgcccaggctggagtgcggtggcgcttccaacctagatctcttgggctcaagtggtcccgtgcttgctttttttttttttcttgaaacagagtctctgtctctggcccaggcttgagcgcagtggcatgttatctgctcactgcaacctctcctcccaagtagatgggattacaggtgcacgtgccacgacgcctggctaatatttgcatttttagcagagatgcagtttcatcatgatggccaggttagtctccaactcctgacctcaggtgatccgcctgcctcagcctcccaaaatgctgagattataggtgtaagccacccagcctagcctccaattttttttaatgtgtgctgccaatgcaagcacatatgtgtaggaattatttttcatgtgagcacatagtatatggaacttaatttttattgatgtacggtctcaaaaatatatattttatcatattcttattatacatgtaacatagtcatatacacacaaaacactcttctatacacagagaatactctcgtatcactttgggtaattttttgtttgtgtgtgtatgtttttgttttttttttagataaggtctgggtctgtcacccaggctagagtgcagtggtgccatctcagcttattgcaacctccacctgccacttcagcctcttgagtagctgtctacaggcgcacaccaccacgcccggctaacttttctgttttctctacacatgaggtatcaccatgttgcccaggctggtctcaaactcttgaactcaagtgatactcctgcctcagcctcctaaagggctgggtttagaggtgtgagccaccacacctcacctgtacctgtgtgtttctgctcattttattgaggagcttttacagcctggcctgtggtctctcctggagggtgtttgtgtgtgtgacaatgcatattcttcaacatcgtagattccattttggatgcccccgtcgggactgtgtgtcactgtactggaactcgagtgaacacttagctcaaaatctattgctgttctctagaatccagcccaattctcatggttaaatataaggtatgtatagtcggcattgctttttgaaacaaggaactggagatggccctgataggggtttatgttctggattccagaaatcatgcaaacagggccaataaatgcatctttatttttgtgtccattttaacctggtcaaggaaaattccaacaaaaaatcaatggtgctggagcaagaagatctcagcctgtgaccctctagagggaagcgctttctgttgtctgaaagaaaagaaagtgcatctttttagaggattacagtttgagaaaagcaacgttaacgttcatgctgatctcggcaatacatttgcagagcgtgcttatcatcagacttggatgagggtgggcttttgttcctggtttgtttgttttctaagacggggtctcttttgcccaggctggagagcagtggcacttccaacctagctctcttgggctcaggtggtcctctttgcagggtcacgatctctgctcactacaatctccccttcccgggttgaagtggttctcccatctcagtctcctgtgttgctgggagtacaggcccatgccaccacgcccggctaatttttgtatttttagcagagatggggtttcaccgtgttgaccaggatggtctccatctcctgacctcgtaatccacctgcctcggcctcccaaagtgctgggtttacagtcatgaaccactgcacccggcctttgatcttaattttcaatatgagacccatcatgaatttgggcatcacctctgcacaggggccatggtgatctctgtcactccattcatttcttatgtgtggagcaaacatttatgtgtaggagtaattctttatgtgagcatacagtatatggaactttctttttttttgagatagggtctggaaaataaatgatgtacagccaggcgcatgagtatatgagcagtttttgtgtgtatacgacatgagcggtggctcatgcctgcaatatcaacactttggcaggttgaggcgagtggatcacttgaggtcaggagtttgagaccagcctgaccaacatggtgaaaccctgtctctactaaaaatacaaaaaattagccagctatggtggcgcacgcctgtattcccatctgctggggaagttgagggaggagaatcacttgaacggacagatggaggttgcagtgagccaagatcacgccaccacactccagcctgggcgagagaataagactgtctcaaaaaaaaaatatatatatacatatatatttatatagagagagagactctgtctcaaaaaaaaaaatatatatatgggtgtgtttgtgtgtatatatatattatatatgatgtatatttcatcatatagccatatatataattatatacacaaaaaatactcttctacacacagagatgactgatatcactttggggtggtttttgcttgtgtgttcttttaaatttttttttgcaacaagatctggctcagtcgcccaggttggagtgcagtgtttcagtcttggctcactgcaaccttcgcctcccaccccagcctcctgaattagtgtctacaggcatgtaccaccacacctggcctacatttgtatttttttacagacagggtttcaccgtgttgtacacgctggtcttgagctcctgagctcaagtgaatctcctgccttggcctcctgatgtgctgggattagaggtatgagccaccacacccaactggtacttgtgtattcctgttcaaattttattgaggagcttttaccacctagcctgtggtctatcctggaggatgtttgtgtgtgcgacaatgtatatagttcaacatcttagatcacattttggatgtttccaatgggactgtgtgtctccgcactggaactcaaatgaacacttggctcagaatccatttgctgttctctggaaatccagtccaattctcttggttaagtataaggtatgtctagtaggcattgctttttctgtttgagaacaaaactcgggaggattgtcccttgatgaacaaggctaacctgctgagcctttgaagcaaggaactggagatggtccttttcaggcgttttattctggattccagaaaacatgcaaacagggccactaaatgcatctttatttttctgtccatttaaacctggtcaaagaaaattccaacacgaaacccagagtgctggagcaagaagatctcaagctatgagtctacaaaggaaagcgctttctgttgtcagaaagaagagaaagcgcttcccttttgagggttacggtttgagaaaagcagtgttgaagttgatgctgatcttggtaatacatttgcagagcatgcttatcatcagacttggatgatagcggggttatgttttggttttgtgtttttctaagacagggtctccgttgcccaggctggagtgcggtggcacttccaacctagctctcttgggctcaagtgatcctctttttatttatttatgtattcatttttgagatggagcctggctctgtcacccaggctggagtagagtgggatgatctccactcattgcatcctctgcctcccaggttccagaaattctcccacctccgtgtcactagtagctgggattacaaatgctcaccactatgacctgccagtttttgtacttttggcacagacggggtttcaccatgtttgcggggctggtctcaactcctgacctcaagtgatctgcctccttggcctcccacagtgctggggattatagatataagccaccgtgcccggcccattcctgtctttttaatttaatctgctcgtccctgacatcgaaaatttttcttgcttaacagcttccacttatttctcggaatagacctttttctgcaggaagggtgtagttgattcaaccctcacccactcatgccaaccgtagtgagtgctgtgactgcagctgcactgtttatcctgttttctgcaggtaatttttccagtgtaccattccaacctgcaaaacctcacatttaaatgcaaatttcttggtaagctgtgaaatgttggctgtggctaatatgagaaacaagctattatagacaagatgaatctcagttgcagtgataaatgtcacatgggacaaaaccacagatactttcacaaaaaccttgaggaccctagaagggcctccctagtaacaggtgggatgcgcatccgctcttgttgccatagtgagtgatgcctgttcgtccagccctcaacacctttcactccgtggaagttatgcctgcactggtttacagaacctcccttgacttgacttgaggtagagttgaagggaacctcagtgtcccttgcagatgggatgtgcattgcttcgcaagagcacagaggtggagtgcatgggctttgagtttttattgggtaaatgaagctgaaatacagggtgtatgaccacgttatcaacgcacacttgatttaggttttgtattttagagacgggggtgtgagctgccaaagcaaggacttatgtgtaggaattattctttctgtgagcatacagtatatggaactttctttcttttgagacagggtctcaaaaatatatgatgtatggccaggtgcggtggatcacgcctgtaatcccagcagtttgggaggccgaggcgggtggataacctgagatcaggagggcgagaccagactggccaacatggtgaaaccatgtctctgctaaaaatacaaaaaattagccagggctggtggcgcacgcctgtagtctcagctactccggagggtgaggcaggagactatcactttgagtgtgtgtctttgtgtgtgtgtgtgtgtgtgtgtgtgtgtgtgtatgtgtttctagtttttacaagacacagcctgactatatcaccgaggctggagtgcagtggtgcaatgttggctcactgcaacctccacctgccaccgcagcctcctgaattagtgtctacaggtatgcaccaccacacctggctcacttttgtattttttgtacagatgaagcttcaccatgttgcccaggcttgtctggaactcttgagctcaagtgatcctctcacttcggcgtcctgaagtgctggggttagagatgtgagccaccgcacccaacaggtacttgtgtatttttttattgaggagcttttacagcgtagcctgtggtctctcctggaggatgtttgtgtgtgcgacaatgtacattcttcaacatcttagattccattttggatgcccccatgggtactacatgtgcctatactggaactcaagtgaacacttggctcaaaatccattgctgttctctagaaattcagttcgattctcttggttaaagataaggtatgagtagtaggcattgctttttctctttgggggcaaaactcaggaggattgccccttgatgaacaaggctaacctgctgagcctttgaaagaaggaactggagatggtccttttagggggtttatattctggattccagaaaacatgcaaacagggccaggaaaaatgcatctttatttttgtgtccatttaaacctggtcaaggaaaattccaacaataaacccagagtgctggagcaagaagatctcaggctgtgaccctccagagggaagtactttctgttgtctgagagaaaagaaagtgcttccctttggactgtttcggtttgagtaaagcagcgttgaagttgatgctgatcttggtaatacatttgcagagcacgctcatcatcagactcggatgatgttggggttctgattttgtttttctccaagacagggtctctgttgcccaggctggagtgcagtggcagttccaacctagctctcctgggcccaagagaccctctatttatttatttatttatttatttatttatttatttatttattcattcattcatttagagatggaatctggctctgtgacccaggctggagtgcagtaggacaatctccactcactgcaacctccatctcccaggttccagcagttctgccacctcagcctcccatgtagctgggattacaggcgcccaccaccatgtcatgctaatttttgtatttttagcagagatggggttacaccatgtttgctgggctgttctcaactcctgacttcaagtgatttgcctccctggcttcccaaagtgctggtattacaggcgtgagccactgtgtccggcctcaagtggtcttcctgagtcagcctcccaagtagttgggattacatggggcgtgacacaacacttggttcagcttttaatttttggtagagatggggtctctgttgctcaggacggtctcaactcctgagctcaagcgatcctacaggtgtgagccaccttgtcctgatgacccatttcaaagatagttgacttggccaggcatcatggggcacacagtcccagttactgcaggggccggggcgggagggtgctttgattttaaggctataccgtgcacagatcccacctttgaatagccactgcactccagcctgggccaacatagcaagatcccatttctttaaaaacagattacatagcacctggtcccacagatttcatttgggttggtcatgtcatacaatggcctcccatcaatttagtataatcaatccaaaccatggttccttcattaagagagtgggtaatcctccaagtccatccagtctattctgtaatccccagtgggtgtccgtattgatacaatttctttttgttcctgttcactcgtgtctttttagtgtaatctgcttgtccgtaacactgaaatttgtttttccccaacatcttgccatcatttctcggaatagacctgctttctctgcaggaagggtgtagttgattcaaccctcacccactaatgccaaccccagtgagttctttgactgtagctgccatgtttatcctattttctttgggtaacgattccaaggtaccattccaatgggcttaaaccttgcatctaaatgccagttacttgctaagatgtcaaatgtgtcttatattagctgtggctaatataagaaactgttgtagacaagatgaatctcagtcacagtgataaatgtagcatgcaacaaaaccagttgttttcacaaaaatcttgaggaccctagaaggggctccctcgtaacaggtggaatgcacagcagctcttcttgttgccatagtgagcgatgcatgttcttccagtcctcaacaccttttatttatttatttatttatttatttattttattattattatttttttttgagacagagtctcgctctgtcacccaggctggagtgcaatggtgtgatctcagctcactgcaaccactgcctcccgggttcaagcgattctcttgcctcagcctcacgtgtcgctaggactacaaccgtgcaccaccacgcccggctaatttttgtatttttaatagagacagggttttgccatgttggccaggttggtctggaactcctgacctcagttggtccacctgcctcagcctcacaaagtgctgtgaatacaggtgtgagccaacacgcccggctatcaacaacttttcctacgtagaaattattcgggcactggtttatagaacctcacgtgggttcacgtagaattgaaggggacctcagcgtcccttgcagatgggatgtgcaatgtatttgagatgtactcgaacattgctgttgaggtgtgggcatcttttgctttttcctaattttaaatatgggactagtctgggtatggtgacttccaccagtaattctagcactttgggaggctgagacaggaggatcacctgaggtcagttgttcgagaccagtctggccagcatggtgaaaccccgtctctactaaaaatacaaaaattagccgggtgtggtggcactcacctgtaatcccagctactcgggaggctgaggcaggagaatcacatgaatctgggaggcggaggttacagcgagcagagatcacaccgttacactcctgcctgggcaacagtgtgagactctgtctctaaataaataaataaataaaaataaaaataattaggtgaatatgggaccagcatggacttgggtgtcgcctttgtgcagtggccaggatattctatgtcatttaaatttttttatgtgtacttccaaagcaagcagttatgtataggaattattcttcctataagcatgcaatatttggaactttctttgagacagggtctcaaaaatacatgatgtatatttcattttatattcttatatattatgtacacacaaaatactcttctaaacacagagaatactccgatatcacctagggtgtgtgtgcgtgtgcgtgtgtgtgcgtgtgtgtgtggttcttttctgagacaatatctgcctctgtcacccaagatggagtgtggtggtgcaatctcggcttactgcaacctccacctcccacctaagcctgctgaattagtctctacaggcatgcaccaccacacctggctaacttctgtaatttttgtacacatggggtctcgccatgttgccggggctggtctcgagctcctgaggcaggtgatcctcctgcctgggcctcctaaagttcgaggagttagaggtctgagccactgggccccacttgtacttgtgtatttctgctcaaattttattgagtagtttttacatcctagcctgtgatctactctggagagtgtttgtgcatatgacagtgtatattcttcaacatcgtagactccattttggatgctcccttcgtgactgtgggtcctgtactggaactcgagtgaacacttggcttaaaatccattgctgttctccagaaatcctgcccaattttctcggttaaaggtacgtgtagtaggcattgctttttctctttggggacaaaactcaggaggattgccccttgatgaacaaggctaacctgctgattctttgaagcaaggaactggagatggtccttatagagttttatattctggattccataaaacatgcatacagggtcaataaatgcatctttatttttgtgtctattttaacttggtcaaagaaaattccaggaaaaaatccacggcatcagagcaagaagatgtcaggctgtgaccctcttgagggaagcactttctgttgtctgaaagaagagaaagtgcttccttttagaggcttactgtctgagaaaagcaacgttgtagttgatgctgatctttgtaatatctttgcagagcacgcttataatcagacttggatgatgttggggttttgtttttcttttgtttttttatctaagactgggtctctgttgcccaggctgaagtgcagtggcacaatcttggctcaccacaacctccgcctcccgggttcaagtgattcttctgcctcagcctcccaagtagctgggattataggactgcgccaccatgcctggctaattttgtatttttagtagagacagggtttctttaggagcttttaaggcctcccttgtagtctatcctggaggatgtttgtgtgtgcaacaatgtatattcttcaacatggtagattccattttgactgctctaatcaggactgtgtgtccctgtgctggaaatcaagtgaacacttggctgaaaatccactgctgttctctagaaatccagcccaattctcttggttaaatataaggtatgcatagtaggcattgctttttctttctggacacaaaactcaggaggatttccccttgatgaacaaggctaacctgctgagcctttgtaggaaggaacgggagatggtctttttaggggtctatgttctggattccagaaaacatgcaaacagagccaataaataggtctttatttttgtctctattttaacctggtcaaggaaaatttctacaaaaaacccagggtgctggagcaagaagatcccatgctgtgaccctctagagggaagcgctttctgttgtctgaaagaaaagaaagtgcatccttttagaggtttactgtttgaggaaagcaacagtgaagttgatgctgatcttggtaatacatttgcagagcatgcttatcatcagacttggatgatggtgggattctgtttttattttgtttttttttctaagacagagtctctcttgcccaggctggagtagggtagcacttccaacgtagatcttttaggctcaaacggtcctcttttttttttttttttttttgaggcggagtcttgctctgtgacccagacgagagtgcaatggcgcgatcttgtgtgcaagctcacctcctgagttcaagcaattcttctgccccagcctcccaagtagctgggactacaggtgcctgccaccacttccagctaatttttgtatttttagtagagacagggtttcaccacgttggccaggctggtctcaaactactgacctcaagatccacccacctcagcctcccaaagtgctgggattacaggcgtgggccattgtgcccagcggtcctcttttttgagatggagtcttgctctgtgacccaggctggagtgcagtggcaggaacttcgctccctgtaccctccacctcccagattcaagccattctctcctgagtcagcctccctagtagctgagatcgcagacatgagccaccatacccagctaatttttgtatttttattatttatttatttactcatcgatttttgaaacagagtcttactccgtccatcaggctggaggtcagtggcacaatcccacgttcaagcaattctcctgcctcatcctcccgagtagctgggatcacaggcgcacaccaccacgcccggctaatttttgtgttttttttgtttgttcgttttttttttttttgtagagacagggtttcaacatgttggccagcccagtctccaactcctgaccttaagtgagcccatacacaatcaagaagagagcgagacctgttctttttttctgtctttgactatttgagacagtcttgctctgtcacccgagatggagtacattagtgtgatcttggctcactgcaacctctgcctcctggactcaagcaattctcttttttttttttttggagaaagagcctctctgtgtctcccaggctggactgcagtggtgtgatctcagctcactgcaacctcagccttccaagtagctgggattgcagacatgtacccccataccagctatatatatatatgtattttagacacagtttcaccatgttagccaggccattcttgaatcctgacctcaggtgatttgccgacgtaggcctcccgaagtgctgggattacaggtatgagccactgcactcagccttttttcctaattttgaatatgggacccattatgaatttgggtgtcacctatgtgcgggggctatggaaatctctgtcaccccattcatttgtgtgtgctgtcaaagcaccaatatgtgggaattatgctttatgtgagcatatagtatatggaactttggtttttttttatacagggtctcaaaaaaaaatgagtatatttcatcacaatgttctgtgtataattccatacacacaaaatagtcttctatacacagagaacactcttatatcactttggagttgtttttgtttgtgtattttgttttaatttttatgagacagggcctggctatgtcgctgaggctggagggcagtggtgagatcttggctcactgcaacctccacctgccacctcagcctcctggattagtgtctacaggcaggcaccaccacccctgggtaagttctgtatttttggtactgatgaggtttcagcacgttccacaggctggactcttaactcctgcgatcaagtgatcctcccgctgttcaaattttactgaggagcttttaaggcctcgcctgtggtctgtcctgtagtgtccctgtcctggaactcaagtgaatacttggtttaaaattgattgctgttctctagaaatccagcccaattctcttggttaaatataaggtatgtgtagtaggcactgctttttctttctggaggcgaaactcaggaggattgccccttgatgaacaaggctaacctgctgagcctttgaagcaaggaactggagatggtcgttttaggggtttatgttctggattccagaaaacatggaaacagggccaataaatgcatctttatttttgtgtccattttaacccagtgaaggaagatttcaaccaaaaacccacggtgctggagcaagaagatctcaagctgtgactctccagagggatgcactttctcttatgtgaaaaaaaagaaggcgcttccctttagagcgttacggtttgggtaaagcaacgttgaagttgatgctgatcttggtaatatatttgcagagcatgcttataattaagacttggatgatggtgggtttctgttttgttttttgttttaaatcagagtctcactctgtcacccaggctggagtgcaatggcgcaatctcggctcactgcaacttccccctcctgggttcaagtgattctcctgcctcagcctcctgagtagttaggattacagacatgcgccacctcacccggctcagtttttgtatttggtggagatggggtttcaccatgttagtcaggctggtcttgaactcctgatctcaggtgatccacctgcctcagcctcccaaagcattgggattacaggcgtgagccaccacgccaggcctgttcaacatcttagatttcattttggatgttcctgtgaggactgcgtgtccctgtgctggaactcaagtgaacgcttggctcaaaatccattgctgttctctagaaatccagccaaattctattggtgaaatataaggtatgtctagtagtcattgctttttctctttggagacaaaactcaggaggattgccccttgatgaacaaggctaacctgctgagcctttgaaacaaggaactggagatggtcctttcaggggtttatattctggattccagaaaacatgcaaacagggccagtaaatgcatctttatttttgtgttcattttaacctggtcaaggaaaattgctacaaaaaacccagggtgctggagcaagaagatctcatgctgtgaccctctagagggaagcgctttctgttgtctgaaagaaaagaacgcgcttccctatagagggttaccctttgagaaaagcagcattgaagttgatgctgatcttgctaatacatttgcagagcatgcttatcatcagacttggatgaaggtggggttctgttttttttttttttctaagacaggatctctgttgcccaggctggaatgtggtggcacttccaacctagctctcttgggctcaaatggtcctctcttttgggatagagtcttactctgtgacccaggctggagtgcagtggcgtgatctcagcttactgccacctccacctcccagtttcaagccgttctcctgcctcagattcctgagtatctgggattataggtacctgacaccacgcctggctaatacttgcatttttctttcttttttcttttcttttttttttttttttttttgagatggagtcttactctgtcaccaggctggagtgcagtggtgcgatcttcgcttatttcaacctccgcctcccagtttcaagtgattctcctgcctcagccacccgactaactaggatttcaggcatgcaccacacgcctggctaattttttgtatttttagtagagacagggtttcaccatgttggtcaggctggtctcgaactcccgacctctggtgatcttcccgccttggcctccgaaagtgctgggattgcaggcattagccaccccgcccggccattatatattcttatatatataataccatatacgtgcaaaatactcttctacatgaagagaatactcttatatcactttggggttttttttgtttgtttgtgtgtgtgtgagtgtatgttttatttgtttttggataaggtctggctctgtcacccagtctagagtgcagttgtgccatctctctcagctcactgcgacttctacctcccacctaagcctgctgaattagtgtctacaggcatgcaccaccacacctggctccgttttgtattttttatacacatgggcttacaccatgttgccgagactggtctcgaacacctgagctcaggtgatacttcagtttcagcctcctaatgtgctgggattagaggtgtgagccaccgtgccccacttgtagttgtgtgtttctgttcaaattttattgaggagtttttagggcctagcctgtgatctaccctggaggatgtttgtgtgtacaacaatgtatattctttaacatcgtagattccattttggatgctcccatcgggactgtgtgtccctgtgctggaactctggtgaacacctggctcaatatccatttctcttctctagaaatccagcccagttctcttggttaaatataaggtacatatgtctatgaggcattgcttttgctctttgagaacaaaactcaggaggattgctctttgatgaacaaagctaacctgctgatcctttgaagcaaggaactggagatggtccttttaggggtttatattctggattccagaaaacatgcaaacagggccaataaatgcatctttgtttttgtgtccattttaaccgggtgaaggaaaattccaacaaaaaacccagagtgttggagcaagaagatctcatgctgtgaccctctagagggaagcactttctcttgtctaaaagaaaagaaagcgcttctctttagaggattactctttgagaaaagcaacgttgaagttgatgcttatcttggtaataaatttgcagagaatgcttataatcagacgtggatgatgttggtgtttcatgtttgttttgttttgtttttaatacagggtgtctgttgcccaggctggagtgtggtggtccctctccaacctagatctcttgggttcaagtggccctcttttttgggtcagagtcttgctctgtggccctggctggagtgcagtgtcaggatctctgctcactacaacctctgcctcctgggtaaaagcgattctcctgcctcagcctcccaagcaactgggattacaggcatgtgctaccatgcccggctaatttttgtaatttcctttatttatttttgagacagagtcttactctttcgcccaggctggagtgcagtggtgcaatctcggctcactgcaacctccaactcccacctcagcctcctgaatagctgtctacaggcatgcaccaccacacctggctaacttttgtattttttgtacagacatggtttctccatgttgcctgggctggtcttgaactcctgaactcaagtgatcctcccacctcggcctcctaaagtgctgtgattagaggtatgagccaccgtgccccacctgtacttgtgtgtttctgctcaaattttattggggagcttttatggtatagcctgtggtctctctggagaatgtttgtgtctatgacaatgtatattcttcagtatgttatgttccattttggatgcttgcatggggactgtgtgtccctgtactgaaactcaggtgaacacttggctctccgtccattgctgttctctagaaatccagcccagttcccttggttaaagataaggtatgtctagcaggtattgctctttctcttgcagacaaaactcaggaggattgccccttgataaacaaggctaacctgctgattctttgaaggaaggaactggagattgtccttttaggggtttatattctggattccagaaaacacacaaatagaaaacagggcaaataaatgcatctttcttttcgagtccattttaacctggttaaggaagattccaacaaaaaatccacggtgccacagcaagaagatgtcaggctgtgtccctctacagggaagcgctttctgttgtctgaaagaaaagaaagtgcttccttttagagggttaccgtttaagaaaagcaacgtttaggtggatgctgatcttggcaataatacatttgcagagcatgcttatcatcagagttggatgatggtggggttctgtttttttgtttttttttttctgagacagagtgtctattgcccaggctggagtgcagtggcacttttaacctagatctcttgggctcaagtggtcctgttttttgggataatctcacactgtgacccagtccggagtacagtggcatgaacaccactcattgcatgctttgcctcccaggttcaagtcattcttatgacccagcttccagagcagctgggattacaggcatgagccaccacactggctaatttttgtatttttaatagagatggggttcaccatgttggccaggctggtctccaactactgacctcatgatccacccacgtcggccttccaaagtgctgggattacagacgtgagccactgtgcccggccaacacagagaatactcttatatcactttggggttgtttctgtttgtgtattttttaaatattttttgagacacagtctggcgctattacctaggttggagtgcagtgttgtgacctcggctcacagcaacctctacctcccagctgagcctcctgagttagcatctgcaggcatgaaccacaacacctggtaacctttgtatttttggacacatgaggtttcaccatgttgcccaggctagtcttgaactcctgagctcaagtaatcctcctgcctccgactcctaaagtgctgggattacaggtgtgagccactgcaccccacctgtacttgtgtatttctgttcaaattttattgaggagcttttacggcctagacagtagtctatcctggagaatgtttgtgtgtatgacaatgtatattctttttttttatttttattttttggagacggagtctcactctgtcacccaggctggagtgcaatggcatgatctcggttcactgaaacctccgcctcctgggttccagcgatcctcctgtctcagcctgctgagtagctaggattacaggtgggcgcctggctaatttagattccattttggatgctcccatcgggactgtgtgtccctatgttggaactcaggtgaacgcttggctcaaaaatccattgctgttctctagaaatcctgcctaattctcttggttaaagataaggtatatgtagcaggcattgctttttctctttggggacaaaactcaggaggattgcgccttgatgaacaaggctaacctgctgagcctttgaagcaaggaactggagatggtccttttaggggtttatgttctggattccagaaaacatgcaaacagggcaaataaatgcatctttattttgtgtccattttaacctggtcaaggaaaattccaacagcaacatcaaaaaaccagtgttggagcaagaatatgtcatgctgtggccctccagagggaagcgctttctgttgtctgaaagaaaacaaagcgctcccctttagaggtttacggtttgagtaaagcagcgttgaagttgatgctgatcttggtaatacatttgcagagcgtgcttatcatcagacgtggacgatggtggggttctgttttggttttgtttttttctaagacagggtctccgttgcccagactggagtgcggtggcacttctacctagatctcttgggctcagatggtcttctttttatttcatttttttaattgtttgagatggagtctcactctgtcacccaggctggagtacagtggcaggatctccacaactacagcctcccaggttccagacattctcccacctcagcctcccgagtagctggaattataagcacccaccgccatgccctgctttttgtatttttagacaagaaagggtttcaccatattggccaggctcatctcaactcttgcccttaagtaatcctcctccctggcctcccaaagtgctgagattacaggcgtgagccaccgcgcccagcctcaagtggtcctcttgagtcagcctctcaagtagttgggactacgtggggcgtgccaccatacttggctaagtttttaatttttggtacaattggggtctctttttcccaggatagtctcatctccacagcttatgtggtcctacacgtgtgagccacctcgtcttgatgacccatttcaaagagagttgacatggccaggcattgtggggcacacagtcccagccactgcagaggccagggtcggagggacctttgatttccagactgtaccatgcactgatcacaccttcgaatagccactgcgctccagcctgggccaacatagcaagatcccatctctttaaaaacagattacatggcacctggttacagaggctccatttgggttggttatttgaaatgggtctcccatcaatttagtgtaatcaatcgaaatcatttccttcattaagagagtaagtagccggggcatggtgcctcatgcctgtaatcccagcactgtgggaggcaaaggcaggcggatcgcctgaggtcaggagttcaagaccagcctggccaatatggtgaaaccctatcactactaaaaatacaaaaattagccgggtgtggtggcgtgaacctaggaggctgaggttgcagtgagctgagattgcaccattgcactccaacctgggcgactgagctggacttaaaaaaaaggtaagtaagccttcaagtctatccaatcttaatttgtaatctcaaatggatgtccatattaacaaaattttcttgtttttcctgtttgtgtctttttagtttaatcttcttgtccttgacactgaaatttttttctctccaacaacttgccgtcgtttctcggaatagagctgctttctctgcaggaagggtgtagttgattcaaccgccacccactcacgccagccccggtgagttctttgactgcagcttccctgattatgctattttcttcgggtaatgaacccaaggtacctcgcatttaaaggctagttgcttggtaagctgtgaaatgttggctgtggctaatatgagaaacaaactatggtagacaagatgagtctcagtggcagtgataattgtcacatgggacaaaaccacagatacttttcacaaaaaccttgaggaccctagaagggcctctctagtaacaggtgggatgcgccgcagctctcgttgttgccgtagtgagcgatgcctgttcgtccagccctcaacaccttttactccgtggaagttatgcctgcactggtttacagaacctcccttgacttgggttgaggtagagctgaagggaacctcagtgtcccttgcaggtgggatgttcactacgtagcaagagcacaaaggtggagtgcgtgggctttgagtttctattgggtaaatgaagctgaaatgtagggcacatgagcacgtcatcaatgtacaattgatttaatttttgtattttagaaacggaggtctcgctatgccgcccagggtagaatgtgctctctccctctcctcttcctagtatctgggactacaggtgaatattttaatctatgcacaggcaagaagagggcaaggagggttcttttgttctgtctttgactttgtgaggcagtgtcactctgtcactcaagctggagtgcaataatgtgatctcggctcactgcaacctctgcctcctgggttcaagcaatttttttttttttttttttttgagtcagtatctcactctgtccctcagggtggagtgcagcggcccagtctctgctcctgcaacttctgactcccaagtaggtacaattgcagacacgtgtcaccacgcttggcaaaattttttttgtatttttagagctgggattttaccttgttggcgaggctggtctggaactcctgacctcaggtgactcgcccaccttggcctcccaacaagttatgctgatcttggtaataacttcgcagagcgtgcttccatcagacatggaggatggtggggtcctgttttgttgttgttgtttttctaagatagggtctcttgcccaggctggagtgtgttggcacttccaacctaggtgtcttgggctcaaatggtcctcttttttcggacagtcttgctctgtgacccatgctggagtgtagtgacgtgatctcagctcactgcaacctccacctcccagttttaggcagttctcctgcctcacattcctgagtagctgggattataggtgcctgacaccatgcctggctaatatttgcatgttatttattcatgtatttatttgttttgagatggagtctcactgtcactcaggccagagggcagtggcaggacctcggctcactcaaacctttgcctctcaggttcaagcaagtcttctgcctcaacctcctgagtagctggaatcacaggcacccgtcaccacgcccggttacttttgtattttttttttcaccatgttggccaggctggtctgaaacccctgacttcatgtgagccgcccgcctcagccacccaaagtggtgggattacaggcataagccactgcgcccggccaacaatgtatatttttcaacatgggagattcagttttgaatgctcccatcgggactgtgtgtccctgtgctggaactcaagtgaacgcttggctcaaaatccattgctgttctctagaaatccagcccaattctcttggttaaatgtaaggtatgtgtagtaggcaatgctttttctggagacagaactcaggaggattgtccctcgatgatctaggctaacctgctgagactttgaagcaaggaactggagatggtccttttagggttttatgttctggattccagaaaacatgcaaacagggccaataaatgcatcctcatttttgtgtccattttaacctggtgaaggaaaattccaacaaaaaacccacagtgctggagcaagaagagctcaggctgtgaccctctagagggaagcactttctgttgcttgaaagaagagaaagcgcttccttttagaggattactctttgagaaaaacaacattgaagttaatgctgatcttggagatcatgcttataatcagacttggatgatgttggggttttgtggggtttttttggttttttttcctaagacagggtgtctgttgcccaggctggagtatggtggcccctccaacctagatctcttgggttcaagtggccctcttttttgggacagagtcttgctctgtgaccctggctggagctcagtatcaggaactttgctcactgcaacctctgcctcccaggttcaaatgattctcctgcctcagcctcccgagcagctgggattacaggcatatgccaccacgcccagctaatttttgtattattgttatgtatttattttttaacttattcattttagagacagagtctcactctgtcgcccaggctggagtgcagtggtgcgatctcggctcactgcaacctccaactcccagctcagcctcctgaatagctgtctgcaggcatacaccaccacacctggctaacttttggtttttttgtacagatgtggtttccccatgttgcccaggttggtctcgaactccttagctcaggtgatcttccaccttggcctcctaaagtgctaggattagtggtgtgagctgttgtgccccacctatactcgtctgtttctgctcagattttattgaggagcgtttacagggtagcctgttgtctaccctgcaggatgtttgtgcctacaacagtgtatattcttcaacatcttagattccatttcggatgcccccatgaggactgtgcgctcctgtactggaactcaagcgaccacttggctcaaaatccattgctattctctagaaatccagcccaattctcttggttaaagataaggtatgtgtagtaggcattgccttttctctttgggaacaaaactcaggaggattgcccgttgatgaacaaggctaacctgctgattctttgaagcaaagaactgcagatggtccttttagggatttatgctctggattccagaaaacatgcaaacagggcaaataaatgcatctttatttttgcgtccattttaacctggtcaaggaagattcccacaaaaaatccacagtgccagagcaagaagatctcaggctgtcgtcctctagagggaagcactttctgttgtctgaaagaaaagaaagtgcttccttttagagggttaccgtttgagaaaagcaacattgaagttgatgctgatcttggtaatacattttcagagcatgcttatcatcagagatggatgatggtgggcttctgtttttgttttgattttttcttttttttttttttgagatggagtttcgttcttgctgcccaagcactagtatgtaggaattattctttatgtgagcatatagtacatggaactttgtttttttgagacagggtctccaaaatatatacatgttatcatataatcttctatgtataattatattcacacaaaatagtcttctgcacacagagaatactcttatatcactttggggttgtttttgtttgtgtattttttttttttttaattttttttgagacaccatctggctctattgcccaggctggagtgcagtgttgtgacctcaactcactgcagcctctacctcccacctcagcctcctgaattagtgtctacaggcatgaaccactacacctggctatcttttgtatttttacagatgaggttttactatgttgggcaggctagttttgaactcgagctcatgtaattttcccgccttcgactcctaaagtgctgggattagaggtgtaagccactgcactccacccgtacttctgtacaaatgttattgaggagcttttacggcctaggcagtgctctatcctggagaatgtttgtgtgtaagacaatgcatattctttttttctttcctgtcacccaggctggagtgcattggcacgatctcgtctcactgcaacctccgcctcccgggttcaagcaattctcctgcctcagcctcctgagtagctgggattacaggtgggcaccaccacgcctggcaaatttagattccattttggatgctcccatcatgactgtgtgtccctgtgctggaactcaagtgaccatgtgactcaatccattgctgttctctagaaatccacctcaattctcttggttaaaggtaaggtatgtgtagtgggcattgctttttctccttggagacaaaacttaggaggattccccttgatgaacaaggctaatctgctgagcctggagattgtccttttagaggtttatgttctggattccagaaaacggtcaaacagcgaataaatgcatctttatatttgtgtccatcttaacctggtcaaggaaaatttcaacaaaaatcccagatggctggagcgagaagatctcatgctgtgactctctggagggaagcactttctgttgtctgaaagaaaacaaagcgcttctctttagagtgttacggtttgagaaaagcaacgttgaagttgatgctgatcttggtaatacattcgcagagcatgcttatcaggcttggatgacggcagggttctgttttggttttatttttttccaagaccagtctctgttgcccaggctggagagggaggggttgcactccaaactagatctcttggggtcatgtcttgctctattattattattaattcttatttttgtgtgtgtgtgagacggagtctcgctctgtcaccaggttggagtccagtggcggaatctcagctcactgcaacctccgactccgtggttcaagcgattctcctgcctcagcctcctgagtagctgggattacaggcacgcaccgccatgccgagctaatttttgtatttttagtagagaccgggtttcaccacgttggccaggatggtctcaaactcctgacctcatgatccacccgcctcggcctcccaaagtgctgggattacaggtgtgagcctccgtgcccagcctgttattttattttgttttattttatttattttattttattttgagatggagactggctctgtcgcccaggctggaatgcagtggcaggatctccactcactgtaactcccacctctgtcgcccaggctggagtgcagtggcaggatctccactcaccgtggagttccagtgattctttcaccttagcctcgcaaatagctggtattacaagcacccaccaacacaccctgccaatttttgtatttttagacaagaaagggtttcgccatgttggccaggctggtctcgactcctgaccttaagtgatccacctccctggcctcccaaagtgctgggattacaggcgtgagccaccacgtccagcctcaagtggtcttcttgtcagcctcgcaagtagttgggctcaggttttaatttttggtagagatggggtctcttttgcctgggatggtctcagctgagcttaagtgatcctaaatgtgtgagccaccttgtcccatttcaaagataggtgacacggccaggcatcctgggacacacagggtcccagttactgcaaaggctagggtgggagggtcctttgattttaaggctataccatgcactgatcacacctttgaatagccactgcactccggcctgggccacatagcaagatcccatctctttaaaaacgcagattacatgccatctggttcctgaggctccatttgggttggtcacttcaaatacaggcctttcatcagtttagtttaatcaatccaaaccatgtttccttcattaggagagtaagggccaggtgtgtaatccaagcactttgggagactgaagcaggcggatcaggaggtcaggagttcgagaccagcctgaccaatatggtgaaaccccgtctctactaaaaatacaaagattaagtgggcgtggtggtgcgtgcttgtaatcccagctactcaggaggctgaggcagcagaatctcttcaacccaggaggcggaggttgcagtgagccaagatcgcgcaggtgcactccagcctgggcgacagagcgaggctccatctcaaaacaaaacaaaacaaaaaatataggcctccacatctatccagtctattctgtaatcccaatggatgtcaatattaatacaatgttcttattttttctatttatttgtatctttttagttgaatctccttgtccctgacactaaattttttttatttttatttatttattttttttgaaacagtcttgctctgtcgcccaggctgcagtacagtggcgcaatctcggcttactgtagcctctgtctcccgggttccagtgattctccttccccaactcccgggtaactgggattttcaggcacacaccaccaccccagctaatttttttgtacgtttagtagagacagggtttcaccatattgggcaggctggccttgaactcctgaactaaggtgatccgcccacctcggcctcccaaagtgctgggattagggataaggctaacctgcttattctttgtagcaaggaactggagatggtcattttaggggtttatgttctggattccagaaaacatgcaaacagggccaataaatgcatcctcatttttgtgtccattttaacctgggcaaggaaaattccaacaaaaaacccagagttctggagcaagaagatctcatgctgtgaccctacaaagggaagcactttctcttgtccaaaggaaaagaaggcgcttccctttggagtgttacggtttgagaaaagcagcgttgaagttgatgcttatctcggtaatacatttgtagagcatgcttatcatgaggcttggacgatggcggggttctgttttggttttgcttttttattctaagacaggatctctgttgcccaggctggagtgcggtggcacatccaacctaggtcttttggattcaaatggtttttttagcggacagagtctctctatcacccaggctgaagtgcagtggtgtgatctcggctcactgcaacctccacctcccaggttcaagcgagtctcctgcctcagcttcccaagtaggtgagattacaggtgcccatcaccacacctggataatattttcattttttaaaattcatttatttatgtttttgagatggagtctcactgttacccaggctggagggccgaggcgtgatctctgctcagtgcaacctctgcctcccggattcaagcaattcttctacctcagcctcctgagtagctagaattacgggagcccaccaccacacctggctactttttgttttttgttttttgttttttttttagtagagatgggatttcaccatgtttgccaggctggtctcaaacccctgacctcaagttagccaccggcctctgcctcccaaagtgctgggattacaggcatgagccaccacgcctggcctaatttttatattttcagcagaggcggggtttcaccatgttggccaggctggttgcgaactcctgacctcaggtgatctgcccacctcagcctcccaaagtgctaagattacaggcgtgagccaccacacatggccattaacaccttttagtccatggaaattattctggcactgatttataaagcctcatgtggggtcaggtagagtcaaagggggacctcagtgtcccttgcagatgggatgtgctcagcaagagcacggaggtggagtgcatggggtttgagttttcactggggaaatgaaaccaacatcttgggtgcatgaccaggtcatatatgcagtcatatatgcaatatgcatggtggtgggtgcctctaatcccagctactcaggaggctgacgcagaagaatcgcttgaacccaggaggcagaagttgccatgagccgagatcccaccaccgcatccagcctgggcggcagagtgagactccgtgtcaaaaaaaagaagatctcaggcagtgaccctctagatggaagcactgtctgttgtataaaagaaaagatcgtgcatccctttagagtgttactgtttgagacaagcaacgttgaagatgctgctgatcttggtaatacatttgcagagcgtgcttatcatcagacttgcatgatgtcggggttctgtttgtgatttgaaatttttccaagacaggctttctattgcccaggcgtgggtggatagcaccttccaccaagatttcttgggcttaagtggtcctctttttattttttgattttttgagacacactcttgtttcgttgggagtgcagtagcaggatctctgctcaccggaaactccacctctcgggttccagtgattctcccacctcagcctgccgaattgttgggaattcaggcatcaggcacccaccatcgtgtcctgcactcttgctgcccatcctggagagcactggcatgatctaggctcactgcaacctccgcctcctgggttcgagtgatgcttctgcctcagcctcccaggtagttgggattacaggcacctactgccccacccagctaatttttatgtttttagtagagacgggtttcaccatgttggccaggctagtcttgaactcccgctttcaggtgatccactagcctgtggtctatcctggaggatgtttgtgtgtgtgacaatgtatattcttcaacatcttagactccattttggatgctcccatcggaactatgtatccctgtgctggaactcaagtgaacactcagctcaaagtccattgctgttctctagaaatccagcccagttctcttggttaaatataaggtatgtgtagtaggcattgctttttctctttagaggcaaaactcaggagggttgccccttgatgaacaaggctaacctgcagagcctttgaagaaaggaactggagatggtccttttaggggtttatgttctggattctagaaaacaggcaaacagggccaataaatgcatctttattgttgtggccattttaacctggtcaaggaagatttcaacaaaaaacccagagtgctggagcaagaagatcccatgctgtgaccctccaaagggaagcgctttctgtttgttttctcttaaacaaagtgcctccctttagagtgttaccgtttgggaaaagccacgttgaagatgatgctgatcttggtaatacatttgcagaccatgcttgtaatcagacttggatgatgttgggagtctgtttttttgtttgtttgtttggttggtttttttgtttgttaggtttttgttttttgttttggtgtgtgtgttttgttttgtgtttttttttttttctaagacaaggtctctgttgcccaggagagactagagaagcactttttaagataggcctgttgggctcagatggtccttttatgggatacagtcttgctctgtgacccagactggagtgcagtggcgcgatcttggctcaatgcaacctccacctcccgggttcgagtgattctcctgcctcagcttcctgggtagctgggattacagatgcctgacatcacactcggctaatatttgtatttttcttttttattcattcattcatttttgagatggagtgttgctgtcacccagcctggagggcagtggcatgatcccggctgactccaacctctgcctctcaggttcaagccattctcctgcctcagtctcctgagtaggtggaattacaggcacccaccactacaaccagctactttttgattttgattttttttttttttttttttttttagtaaaggtggggtttcaccatgttggccaggctagtctcaaacccctgacctcaagtgagccgctggcctcggcctcccaaagtgctgagaatacaggcgtgagccaccgggcacagccatcagcaccttttactttatggaaatttttctggcactggtatagaacctcacgtggggtcaggtggagttgaggggacctcagtgtccctgcagatgggatgagcaagagcacggaggtggagtgcatggggcttcagtgtttattggggaaatgaagctgaaatctgggtgcatgaccaggagataaatgcatgagacggcggtctcactatgctgccctggctgaagtgggcttagatcctcctgcctctgcccctccccagtccttggtagatgggaccacatgtgaatattaaccccccatgcacagacaagaagaaagtaaggactgttctttggttcatacctgaccccagttaaacttgtattttagataaacaatgtatttgagatgtacttgaacaacaaacgatttgctgttcaggtgtgggcatctttgttttgtttttttttttcctaattttaaatatgggactagtgtgcatatggtggctcttgtctgtaattcctgcactttgtgaggctgagacaggaggatcacctgagatcagttgttcgagaccagcctggccaacatgaagccaggaggctgagctttcagtgagctgaaatcttctgctgcactccaccctgggcaacagagtgagactcagtctcaagaaagtaaaaaataggccgggcgcggtggcgcatgcctgtaatcccagcactttgggaggccgagacgggaggatcacctgaggtcaggagttcaagaccaacagggccaacatggcaaagcctcgtctctactaaaaatacaaaaattagctgggtgcaatggtgcacatctgtaattccagctactccggaggctgaggcaggagaatcccttgaacccaggaggaggagatttcagtgagctgaaatcaagccatggcattccagcctgggccagagagcaacattccgtctcaaaaataaatgaataaataaaataaataaaaataaatagataaatatgggacatcataaatttgggtgtcacctttgtgtagcagccagcgtaatctctgtcattccaatttttttttatgtgaactgccaaagcaagcacttgtgtaggaatttttcttcctgtgagcatacaatatatggaactttctttgacacagggtctcagaaatatatggtatatatttcgttatatatatacttatatataatataatcatatacacacaaaatactgttctaaatacagagaatactctgatataaccttgggtatttttttctttctttgtgtgtgtatgttttttatttgtttggctggtttttttttgtttttgttttttgttttttgttttttgtttttgtttttgttttgagacagagtctcactctgtcgccgaggctggagtgcagtgacaggatctcgggtcactgcaagctccgcctaccgggttcacgccattctcctgcctcagcctcctgagtagctgggaccacaggcacccaccaccacacctggctaatttttttttgtatttttagtagagacagggtttcgccatgttagccaggatgatctcgatctcctgacctcgtgatccacccgcctcggcctcccaaagtgctgggattacaggcgtcagccaccgcgcccggccagttggttatttttgagacaaggtctggctctatcacccaggctggagtgtagtggtgcgatcttggctcactgcaacctccacctcccacctaaacctgctgaattagtgtctacaggcatgcaccaccacacctggctcacttttgtgtttttcatacacatgggtttacaccatgttgctggggctggtctcaggaactcctgagctcaggtgatcctcccgtcttggccccctaatgtgctaggattagaggtgtgagccaacccaccccacccatacttacgtatttctgttcagattttattgagtttttatgaccaagcctatggtctatcctggagaatatttgtgtatgtgacaatgtatattcttcaacatcgtagactcgattttgggtgctcccatcgggactgtgtgtacctgtcctggaactcaagtgcacccttggctcataatccattgctcttctccagaaatcttaccaattctcctgcttaaatataagctacgtgtagtaggcattgttttttcttagcagatacgaaactcaggaagattgtcctatgataaacaaggctaacctgctgattgtttgaagcaaggaactggagatggtccttttaggggtttatgttttggattccagaaaacgtgtaaacagggccaatacgtgcatctttattttgtgtccagtttagcctggtcaacaaaaatgtcaacaaaaaacccagagtgctggagtaagaaggtctcgggctgtgactctccaaagggaagaattttctcttgtctaaaagaaaagaacgcacttccctttagagtgttaccgtgtgagaaaagcaatgctgaagttgatgctgatcttgcaaataactttgcagagcctgcttataatcagactttgacaatggtgggcgtctgtttttttttttctaagacaggatctctgttgcccaggctggagtatggtggcacttccaacctaggtctcttgggctcaaatggtcctcttttttgggacagagtcttgctctgtgacccaagctagaccacagtggcacgatcttggctcacggcaatctctgcctcccagtttcaagtgattcccctgcctcaacttcctgagtagctgggattataggtgtctgacaccatgactggctataattttcatttttcttatttatttatttttgagtctcgctgtctctcaggctggagtgcagtggcagcctttgcctcttgggttcaagcaattttcctgcctcagcctcccaagtagttggaattatatgtgtcaccatcatgccctttttgtttttttttagtagaaaatgggtttcaccacgttggccaggctagtctcaagcccctgacctcaagtgatcctcccgcctcagactcccaaagtgctgaaaatgcaggcgtgagccactgcaccgagccatcaacaccttctactccatggaaatgatactggcgctggtttatagaacctcacttggggtcgggcagatttaaaagggacctcaggctgggtgtggtggctgacgcctgtaatcccagcactttgggaggccgaggcgggtggatcacgaggtcaggagatcgagaccatcctggctaacatggtgaaaccctgtctctactaaaaatacaaaaaattagccaggcgtggtggcgggtgcctgtagtcccagctactcgggaggctgaggcaggagaatggtgtgaacccgggaggcggagcttgcagtgagccgagatggcaccactgcactccagcctgggcgacagagcaagactctgtctcaaaaaaataaataaataaataagggggtgggggacctcattgtcccttgcagatgggatgtgccctgcttagcaagagcacggaggtggagtgcatggctttgagttttcactggggcacggaggtggagtgcatggctttgagttttcactgggtaaatgcagctgaactcttggctgcacgaccaggtcatatgtgcaacgagacaggggtctcactatgctgcccaggctaaaatgggcttaggtccttttgcctccacctctccccagtccttagtagctgggactacatgtgaatattaaccatgcacaggcaagaggaaagaaaggaccgttctttggttcacacctagccgccagtcaaattagtattttagatgaagactgcatttgagacatacttgaacaacaaatgatttgctgtttaggtgtgggcatctttcttttttcctagttttaataatggcaccaggcagagtacagtggcccacgcctgtaattccagcactttgggaggctgagacaggaggatcacctgaggtcgggaatttgattccagcctggccaacatggtgcagccccatctctactaaaaatacaaaattagcccagcatggtggtggtatatgcttgtaatcccagctactctggaggctgaggcaggagagtcgcttgaagctggaaggctgatctttcaatgagctgagatcacgccactgcactcaagcctcggcaaaaagagtgagactccatctcaaaaacataaaaaataggccagacacggtggtccactcctgtaatcccagcactttgagaggccaggacaggcggatctcctcaggtcaggagtccaagactagctgggcaaacaaggcaaaacctcgtctatactaaaattaggaaaaatggctgggaacagtggtggacacctgtaatctcagctacttgggaggccacggcaagagaatctcttgaacctgggaaaaggagattgcagtgagacgaaatcacaccattgtactccatcctgggtgacagagtgagattctgtttcaaaaattaaataaataggccgagcacagtgactcatgcctgtaatcccagaactttgggaggccgaggtggcggatcacctgaggtcgggagttcaagaccagcctaaccaacacgtagaaaccccatctctactaaaaatacaaaattagccgggcatggtggcgcatgcctgtaatcccagctgctcgggaggttgaggcaagagaatcacttgaaccccagggggcggaggttgtggtgagccgagattgtgccattgtattccagcctgggcaacgagtgaaactctgtctctaaataaataaataaaactattaaataaacattaaacgttaaaaaataaaaatagataaatatgagatcatcatgaatttgagtgtcacctttgcgcagggcccatggtaatctttgtcattccaattttttcatgcgtgctgccaaagctagcacttgtgtgtaggaagtattcttcctgtgagcatacaatatatggaagtttcttttattattattattttttatgtttttgcgactgagttttgctcttgtcgcataggctgaagtgcaatggtgtgatctgggctccctgcgatgtccacctcttgggttaaagcgactctcctacctcagcctcctgagtagctgggattacaggcatacacttccagggctagctaatttgttgtattttagtagacgggatttctccatgttggtcaggctggtctcaaactcccgacttcaggtgatctgcccaccttggctttccaaagtactgggattgcagacagccaccgcggctggccttcatatattcttatatatataatatcatgtacacacaaaagactcttttacaccctgagaatactcttatatcactttgggcatttttttgttggtgtgtgcattttttgtttgttcgttcgtttgtttttgagacaagatctggccctgtcacctatgctggagtgcagtggtgtgatctcggctcccggcaacctcaacctcccacctcagcctcctgaattagtgtctacaggcatgcacctctatacctggctaacttttgtatttttacagatgaggttttaccatgtttcccaggctggtgtctaactcctgagaatataaggtatatgtagtaggcgttgctttttctctttgaagacaaaacccaggacagttgtccctcgatgaacaaggctaacctgctgaacgtttgaagcaaggaactggagatggtctttgtatcggtttatgttctagattccagaaaatatgcaaacaggaccaataaatgcatctttatttttgtgtccattttgaccaggtcaaggaaaatttcaacaagaaacccagagtgccggagcaagaagatctcaagctgtgagtctacaaagggaagccctttctgttgtctaaaagaaaagaaagtgcttctctttggtgggttacggtttgagaaaagcaacgttgaagttgatgctgatttcggtaatacatttgcagagcatgcttatcacacttggacgatggtggggttctgttttggttttgcttttttattctaaggctctgtgttgctcatgctggagtgcagtgacatgtccaatatatctcttggcttcaaatggtcagcctgggcaacacagggaaattctgtctcaaaaaataaacaaatgaataaaaatacaaaataaagccgggcatggtggctcatgcctgtaatcccagcactttgggaggccgatgcaggtagatcatctcaggtcaggagtttgagaccagtctgaccaacgtggtgaaaatccgtctctactaaaaatacaataacaacaaaaattagcccagtgtggtggtgggcacctgtaatcccagctacttaggaggctgaggcaggagaattgcttgaacccgggaggcagaggctgcagtgagccgagattgtgccacagcatccagccaggatgacagagtgagattccgtctgaaaaaaaaaaaaaaaaaaaaaagctgggcgctgtggctcacgcctgtaatcccaccactttgaaaggccgaggcgggtggatcacgaggtcaggagatcgagaccatcctggctaacacggtgaaaccccatctctatttaaaaatacaaaaaattagcgaggcgtggtggtgggtgcctgtagtcccagctacccgggaggctaaggcttgagaatggcttgaacccaggaggcggagcttgcagtgagccgagatcgtgccattgcactctagcctcggcaacagagcaagactccgtcaaaaagaaacaaaaacaaaaacaaaaaaaagaaccctacagtactggagcaagaagacctcatgctgtgaccctctagatggaagcactgtctgttgtctaagaaaagatcgtgcatccctttagagtgttactgtttgagaaaagcaacgttgaagatgctgctgatcttggtaatacatttgcagagcgtgcttatcatcagacttgcatgatgttggggttctctttggtttgtttttttccaagacaggttccctgttgcccaggcgggagtgggtggcacctccaaccgagatctcttgggctcaagtggtgatctttttatttttgattttttgagatgcgctctcattccgtttcccaggctggagtgcagcggcaggatccctgttgaccggaaactccgcctcccagcttccggcgattctcccacctcagcctgccgaatagttgggaatagagatgcccgccatcgtgtcctgctagttattatttttattgttgttgttgttgttgagatggagtttcactcttgatgtccaggctggagtgcagtgttgcaatttaggctcactgcaacctccacctcctgggttcaagcgattctcctgccgcagcctcctgggtagctgggattacaggtgcctactgccccacccagctaatttttgtgttttgaatagagactgggtttcaccatgttgggcaggctggtctcaaactcccgacctcaggtgatccaccagccttggcctcctaaagtgctgggattacaggcgtgagccaccgcccctaatctcacgtggtcctctagagtcagcctagactctggtctatcctggaggatgtttgtgtgtgagacaatgtatattcttcaacatcagcccaattctcttagctaaatgtaaggtatgagtagtaggtattcctttttctctttggggacaaaactcaggacgatcgccccttgatgaacaaggctaacctgctgagcctttgaagcaaggaattggagatggtcctttcaggggtttatgttctggattccataaaacatgtaaacagggccaataaatgcatttttatttttgtatccgttttaacctggtcaaggaaaattccaacaagaaacccagagtgctggagcaagaagatcccatgctgtgaccctctagaggaagcactttctgtttgttgtctgagaaaaaacaaagtgcttccctttagagtgttaccgtttgggaaaagcagtgttgaagttgatgctgatgttggtaatatatttgcatgcttattatcagacttggatgatgttggggttctgttttgtttttgttttctaagacagggtctctgtggcccaggctggagtacagaggcacttccaacctaggtctcttgggctcatatggtcctttttgggacagtcttcctctgtgacccaggctggagtgcagtggcacgatcttggctcactgcaatctccacctcgcgggttcaagctattctcctgcctcagcttcctgaatagctgggattgcaggggcccgacatcacacttggctaatatttgtatttttcttttttattcatttatttatttttgagatggagtctcgtttccccagctggagagcggtggcatgatcccgactgactccaacctctgcctctcaggttcaagcaattctcctgcctcagcctctgaagtagctgaaactacaggtggccgccaccacgcctggctacgttttgaatttttttttttttttttttcagtagagatggggcttaccatgttggccaggctggtctcaaacccctgacctcaagtgagccactcaccttggcctccgaaaatgctgagaatacaggcatgagccaccaccgcgcgcctcccaaaggcgtgagccatggtgcgtggccatcaacacctcttactttatggaaatttttctggcactggtatagaacctcacatggggtcaggtggagttgaggggacctcagtgtccctgcagatgggatgagcaagagcacggaggtggagtgcatggggcttcagtgtgtattggggaaatgaagctgaaatcttgggtgcatgaccaggagataaatgcatgagacgggggtctcactatgctgccctggctaaagtggtcttagatcctcctgcctctgcccctcccaggccttgttagatgggactacatgtaaatattaacccatgcacaggcaggaagaaagtaaggaccattttttggttcgtcccggccctcagttaaacttgtgttttagataaacaatgtatttgagatgtgcttaaacaataaatgatacgctatttaggtgtgggcatctttgtttccccctaattttaatgatgggactagtccaggtatggtggctcctgcctataattccagcactttgggaggccgagacaggaggatcacctgaggtcagttgttcgagaccggcctggccaacatggtgaaaccccgtccatactaaaaatacaaaaatcagccaggcctggttgcacacacctgtaatcccagctactcgggaggctgaggcaggagactcgcttgaagccaggaggctgagctttcagtgagctgagattgcgccactgcattccagcctgggcaactgagtgagtctcagtgtcaacaaagtaaataatagtctaggcacagcggcacacgcctgtaatcccagcactttaggaggctaagacgggaggatcacctgaggtcaggagttcaagaccaacggggccaacgtggcaaagccttgtctctactaaaactacaaaaattagctgggtgcggtggtgcacatctgtgattccagctactcgggaggccaagacaggagaaccacttgaacccaggaggaggcgatttcagtgagctgtaatgaagccatggcattccagcctgggccacagagcaagattccgtctcaaaaataaataaaacaaataaaaatacgtagataaatacgggaccgtcgtgaatttgagtgtcacctttgtggagcagccacggtaatctctgtcattccaattttttttatgtgcactaccaaagcaagaacttgtgtaggaattattcttcctgtgagtatgcgatgtatggaactttccttgagacagggtctcaaaaatatatcatgtatattttatatattcttatcatatataatataatcatgtacacacaaaatactcttctaaatacagagaatactctgatatcaccttgcgtattttttgtttgcatgtgtctgtgtttggttgttttttttttgtcatatttttgtatccctacttatatatttatttttaattttattattatactttaagttctagggtacatgtgcacaacgtgcaggttagttacatatgtatacatgtgccatgctggtgtgctgcacccattaactcatcatttagcattaggtatatctcctaatgctatccctccccgctacccccacccaacaacagtccccggtgtgtgatgttccccttcctgtgtccatgtgttctcattgttcagttcccacctatgagtgagaacatgcggtgtttggttttttgtccttgcgatagtttgctgagaatgatggtttccagtttcatccatgtccctacaaaggggttggttatttttgagacaaggtctgactctatcgcccaggctggagtgtagtggtgccatctcggctcactgcaacctccacctcccacctaatcctgctgaattagtgtctgcaggcatgcacaaccacatctggctcacttttgtattttttatacacatgggtttacaccatgttgcaggcgctggtctcaaactccctcccaagctcaggtgatcctctgtctcagcctcctaaagtgctgggattagaggtgtgagccaccacaccccactggtatttgtgtgttcctgttcaaattttattgaggagtttttataaccaagcctgtggtccatcctggaggatgtttgtgtgcatgacaatgtatattcttcaacatcgtagactcgatgttggatgctcccatcgggactgtgtgtccctgtactggaactcgagtgaacacttggctctaagttcattgctgttttctagaaatccagcccaattctcttggttaaatataaggtgcacgtagtaggcattgctttttctttctggagacaaaactcaggaggattgccccttgatgaacaaagctaacctgctgagactttgaagcaaggaactggagatggtccttttaagggtttatattctggattccagaaaatgtgcaaacagggccaataaatgcatctttatttttgtgtccattttaacctagtcaaagaaaattacaacaaaaaatccacagtgctggagcaagaagatctcatgatgtgaccatctggaggtaagaagcactttgtgttttgtgaaagaaagtgcttcctttcagagggttactctttgagaaaagcagcattgaagttgatgctgatcttggtaatacatttgaagagcatgcttatcatcagacttggatgatcttggggttttgtttttttctaagacagggtgtctgtagcccaggctcgagtgcggtggcacttccaacctagatctcttgggctcaacaagtagccctctttttcggacagagtctcgcgctgtgaccctagctggagtgcagtggcaggaacttggctcactgccacctctgcctcctgggttcaagcaattctcctgcctcagcctcccgagcagggttataggcatgtgccaccacacctggctaatttttgcattttattatcgattgattgattgattgttgagacagagtctcactctgttgcccaggctgtagtgcagtggtgtgatctcggctcactgcaacctccacctcccacctcagccttctgaatacctgtctacaggcatgcaccaccacacctcgccaacttttgtgttttttgtacagatgaggtttcaccatgttgcccaggctggtcttgaacccctgagctcaagtgatcctcccacctcggcctcctaaagtgtgagtcactatgtcccgccctacttgtgtgtttctgcttacattttattgaggcgattttttttttttttttgagacggagtcttggtctgttacctaggctggagcgcagtggcgcgatcttggctcactgcaagctccgcctcccaggttcatgccattctcctgcctcagcctcctgagtagctgggactacaggcgcccaccaccacgcccggctaatttttttgtatttttagtagagatggagtttcaccttgttagccaggatggtctagatctcctgaccttgtgatcctcccgcctcggcctcccaaagtgctgggattacaggcatgagcgaccgtattgaggcgcttttacaacatagcctgtggtctatcctggggaatgtttgtgtgtgtgacaatgtatattcttagacatcttagattccattttggatgctcccatcggtactatgtgttcctatataggaactcaagtgaacacttggcttaaaatccattgctcttgtctagaaatttagcccagttatcttggttaaagataaggtgtgtctggtaggcattgatttttctttccggagaaaaaacttaggaggatttcctcttgatgaacaaggctagcctgctgagcctttgaggcatgggacctggagatgatcctgtgaggggtttatgtttttggattcaggaaacacaccagcaggacaaataattgcatctttatttttgtgtctattttcaccaggctaaggaagattccaacaacatatccatggtgctgaagtaagaagatctcgtgctgtgaccctctagagggaagcactttctgttgaaagaaaagaacatgcatcctttcagagggttactctttgagaagagcaacgtttagtttgatgttgatcttggtagtacatttgcagagcatgcttttatcatcagacttggctgatggtggtgttctgttttttgttgttgttttctacaacaggatgtctgttgcccaggctagggtgtggtggcacttacaacctagatctctagggctcaaatggtcctcttatttggggcagagtcttgctctgtgatccaggctggagtgcagtggcaggaactctgctcactgcaacctccgcctcccgggttcaagtgattttcctgccttggttttctgagtaggtgggattacaggcgcacaccaccacacccagctagtatttgtagttttctttattattcttttttttattttaatttttgagacgaagtctcgctgttgcctacggtggagtgcagtggcgtgatctcggctctctacaacgtctgcctcccaggttcaagcaattctgctgcctcagcctcccgagtagctggaatcaacaggaacacaccaccatgcctggctactttttggatttttttttagtagagacggagtttcaccatgttggccaggctggtctcaaactcctgacctcatgtgagccacccacctcggccttccaaagtgctggaattacaggcatgaaccacgacgtctggcctaatttttgtatttttagaagagacagggtttcaccatgttggccaggctggtctcagctcctgacctcaagtgatcctccccctcggcctcccaaagtgctgggattacaggcgtgagccacctcgcccagcctcaagtggtcctcttgactcagcctcccatgtagttgggactacatggggcgtgccaccacacttggctaagtttttaatttttcatacagatatgatctctgttgctcaggaaggtctcaacacctgagctcaaggattccacaggcgtgagccacattctcctgctgacccttttcaaagatagttgacatggccaggcatcatggggcacacagtcccagccaccgcagatcccggggtgggagggtcctttgatttccagactattccatgcactgatcacaccttgtttttttgtttgtttgtttgtttgtttgtttgtttgacagagtctcagtttgttgcctggcgggagtgcaatgatgtgatctcgggtgactgcaacctctgcctccaaggttcaagtgattctcctgcctcaccctccaaagtagctgcggttacaggcatgcaccaccacacccagctcagtttttgcatttggtagagacaggttttcaccatgttggtcaggctggtctcgaactcctgatttcaggtgatccacctgcctcagcctcccaaagagctgggattataggcgttagcctatgcgcccggtctgtatttcctaattttaaatatgggacccatggtgaatttgggtgtcactgtgtacaggggacatgggaatctctgtcattccaatttttttaatgcatgctgttctgtgtaggaattattcttcctgtgagcaaacaacatagagagctttctttttttgacaccgggtctcaaaaatatatcatatacattttattataatgtctgatattgataatataatcatacacacacaaaatactcttctgtacacagagaatactgatatcactttggggtttttttgtttgcgtgcgttttttgggattttggggtgtttttttttttttttttgagacaacatctggctctgttgcccatgctggagtgcagtggtgcaattggctccctgcaacctccacctcccacctcccacttcagcctcctaaagagctgaatacaggcatgcaccaccacacctgactaacttttgtattttttgtacacacagggtttaccatgtttcccaggctggactggaactccagagctcaagtgatcctcccgacttggcctccttaagtactgcagttagaggtatgagccgccgagacccaccgtacttgtgtttttctattcaaatattattgaggagcttttatggcctaacctgtggtctatcctggaggttgtttgtgcgtacaatacatagtcttcaatatcttttttttttttttcattttttgagagggagtttcgctcctgtcacctaggctggagtgcaatgacatgatctcagttcactgcaacctccgcctcctgggttcaagtgattctcctgcctcagcctcctgagtagctgggattacaggcacccgccaccatgcctagctaagtttgtattttcagtagagacgggcttctccatgttggtcaggctgggctcagactcctgacctcaggtgatccgcccgcctcggcctcccaaagtgccgggattacaggcgtgagccaccgcgcccagtcatcatatattcttatcatatatatagtaggatgtttgtgtatataacaatgtacattttcaacattgtagattccattttggatgctcccattgggactgtgtgtccctgtgctggaactcaagtgaacacttggctcaaaatccattgctgttctctagaaatccagcccaattctcttggttaaatataaggtatgtgtagtaggcattgctctttctctttagagacaaagctcaggattgccccttgatgaacaaggctaacctgctgattctttgaagcaaggaactggagatggtccttttagtggtttatgttctggattccagaaaacatgcaaacagggccaatacatgcatctttacttttgtgtccattttaacccggtgaaggaaaattccaacaaaaaacccacaatgctggagcaagatctcaggctgtgaccctctagagggaagcgctttctgttggctaaaagaaaagaaagcgcttcccttcagagtgttaacgctttgagaaaagcaacgttgatcttggtaatacacttgcagagaatgcttataatcaaccatggaaggtggtggggttttgtgtttgtttgttttgttttgttttctaagacagggtgtctgttgcccaggctggagtgtggcggcccctccaacctagatctcttgggttcaagtggccctcttttttgggacagagtcttgctctgtgaccctgccctggctggagtgtcctgtcaggatctccactcactgcaacctctgcctcctggggtcaagggattctcctgcctcagcctcccgagcagctgggattacaggtatgtgccaccacacctggcttatttatttatttatttatgagacagagtcttgctgtgtcatccatgctggagagcagtggtgcaatctcggctctctgcaacctccacctcccacctcagtctcctgaattagtatctacaggcatgtaccaccatacctggctaacttttgtatttttacagatgaggttttaccatgtttcccgggctggtgtctaactcctgagctcaagtgatcctcctgccttggcctacgtaagtgctgcggttagaggtgtgagccaccgcgccccacctgcccttgtgtatctctgttcaaatgttactgagaagcatttacgggataatgcccggaggatgtttgtgtgtgtgacagtgtacattcttcaacatcttagattccattttggatgctcccctcgggactgtgtgtctctgtcctggaattcaagtgaacacctggctctccatccattgctgttctctagaaatccagcccaattctcttggttaaatataaggtaggtgtagtaggcattgctttttctctttggggacaaaactcaggaggattgccccttgatgaacaaggctaacctgctgattctttgaagcaaagaactggagatggtccttttaggggtttttattcaggattccagaaaacatgcaaacagggccaaaaattgcatctttatttttgtgtccattttgacctggtcaaggaaaatttcaacaagaaacccagagtgccggagcaagaagatctcaagctgtgactgcaaagggaagccctttctgttgtctgaaagaagagaaagcgcttccctttgctggattacggtttgagaaaaacaacactgaagctgatgccgatcgtggtaatacatttgcagagcatgcttatcatcaggcttggacaatgccggggttctgttttcggttttgcttttttattctaagacaggatctctgttgcccaggctggagtgcagtgacatgtccaacccaggtctcttgaattcaaatggtcctttttagggggcagagtctttctctgtcacccaggctgatatgcagtgaggcgatctcggctcactgcaacctctgcctcccaggttcaagcaattctcctgcctcggcttcccaagcagctgagattacaggcgttcatcaccatacctggatgatatttgtattttttaaaatttatttatttatttatttttgagacggagtctcgctgtcacccagtctggagggcagtggcacaatctcggctcactgcaacctctgcctccccggttcaagcaattcttctgcctcagcctcctgagtagctggaattacagaagcacaccaccgcacctagttactttttgtatattttttttaagtagagactggatttcaccgtgttggctaggctggtctcaaattcctgacctcaagtgatccacccacctctgactcccaaatttctgggatcacaggtatgcgcccccatgcctggcctaatttttgtatttttagcagagacgtggtttcaccatgttggccaggctgaactcagctcctgaccttaggtgatctgcccgcctgggcctcccaaagtgctgagaatacaggcgtgagccaccgtgcctggccattaacaccttttggtccacggaaattattctggcactggtttatagaacctcgcttggggtcaggtagagttgaaggggaccccaatgtccttgcaggtgggatgtgcactgcttagcaagaacacggaggtggaatgcatggggtttgagtttttattggagaaataaagccaaaatcttgggtgcatgaccaggtcgtatatgcaacaatacgggcgtctcactatgccgcccaggctaatgtgggcttagatcctcctgcctctgcccctccccagtccttagtagctgggactacatgtgaatattaactcacgtacaggaagaggaaagtaaggactgttctttgattcacgtcccacccccagttaaatttgtattttagataaacaatgtatttgagatgtacttgaacaacaaatgatttgctgtttagatgtgagcatctttttttgctcctgattttaaacataggacaaggtcaggtatggtggctcacgcctgtaattccatcattttggtaggcagagacaggaggatcacctgaggtcagctgcttgagaccagcctggccaacatggtgaaaccccatctgtactaaaaatacaaaaattagccatgcgtggttgtgctgcacgcctgtaatcccagctactcaggaggatgaggcaggagaatcgcttgaagccgggaggcagaggttgcagtgagctgagatcgcgccagtgaactacagcctgggcaaaagaataagattcaatctcaaaaaaataaaaaataggccaggcacggtggcacacacctgtaatgctagcacttttggaggtcgagacgggggcatcacctcaggtcaggagttgaagaccagctgcggcatcacggcaaagcctcatctctacgaaaaatacaaaaattagccaggtgcagtggcaggtgcctgtaataccagctactcgggagaccaaggcaggagaatcgttccaactgggcggcagaggttgcagtgagccaagatcgtgccactgcactgcagcctgtcgacagagtaagacttggtctaaaaaaaaaaaataaataaataaataaaagataaatatggaaccatcatgaatttgggtgtcacctctgtgtgggggccagggtaatctctgtcaatccaatttttttttatgtgcaccagcaaagcaagcacttatgtttaggtattattcttcctgtgagcatacaatatgtagatctttattttctttgagacatggtctcaaaaatgtatgatgtggctgggcacagtggctcaagcctgtaatcccagcactttgggaggctgaggcgtgtggatcacccgaggtcaggagttcaagaccagcctggccaacatggtgaaaatccgtctctacgataaatacatatatatatatatgtatatatgccgggcatggtggcaggtacgggtaatcccagctacttgggagcctgaggcaggagaatcgcttgaacctgggaggtagaggttactcatatcactatgagattgttttttgttcttgtgtgtgtggtttttgtttgtttttgagacaaggtctggctctgtcacccaggcaaaagtgtagtagtgcgatctcggcttactgtaacctccatctcccacctatgcgtcctgaattagtgtgtctacaggcatgcaccaccacagtgggctaccttttttttttgagagggaattttgctcttgttgcacaggctggagtacaatggcaagatttcagatcactgcaacctccgccttccgggttcatgtgattctcctgcctcagcctcccaagtagctgcgattacaggcatgcaccatcacacttggctaattttgtattttgagtagatacaggtttccccatgcttgtcaggctggtctccaactcctgacctctagtgatccacctgcctcggactcccaaattgctgggattacaggcatgagctaccacacccagccacctggctaacttttgtagtttttctacagactacaaaatggtttcaccattttacctgagactacaaaatggtttcaccattttacctgagactacaaaatggtttcaccattttacctgagctggtctccaacacctgagctaaagtgatcctcctgcctcggcctcataaaatgttgggattagaggtgtgagccaccgtgcctcacccgtacttgtgtatttctttatttttattgatttatttattttgagacagagtttcactcttgttgcccaagctggagtgcaatggcacaatctcggctcaatgcaacctccttctcttaggttcaagcgattctcctgcctcagcttcccgggtagctgggattaaaggcgtccaccaccacacccagctaatttttgtgtttttagtagagacagggtttcagcatgttggccagactggtctcaaactcctaacctcaggtaatccacctgcctcagccttccaaactgctgggattacaggcatgagccactgcgcctagcctcaagtggtcctcttaagtcagcctaaactgtggtctatcctggaggatgcttgtgtgtgtgacaatttatattcttcaacgtcttagattctattttggaggctcccaaggggattgtgtgtccctgtgctggaactcaagtgaacacttggctgtacatccattgctgttctctagaaattcagcccaattctcttggttaaagataaggtatgtgtagtaggcattgctttttctttccagagacaaaactcaggaggattgccccttgatgagcaaggctaacctgctgattctttgaagcaaagaaccagagatggtccttttaggggtttatgttctggattccagaaaacaggcaaacaggaccaataaatatatttttatttttctatccactttaacctggtcaaggaaaattccaacaagaaacccagagtgctggagtgagaagatcccatgctgtgaccctctagagggaagcactttctgttgtctgaaagaaaccaaagcgcttccctttggagcgttacggtttgagaaactcaatgttgaagttgatgctgacttcagtaatacatttgtagaggatgcttatcatcagacttggatgatatcggggttctgtgcttttttttttttttttctcctaagacaaaatctgtattttccaggctggagtccataagcacttccaacctaggtctcttgcgctcagatagtcctcttttttgggacagagtcttgctctgtgacccaggctggagtgcagtggcgtgatctcggctcactgcaacctctgtctcctgggctcaagcaattctccttcctgagcttcctgaggagctgggattacaggcgcctgacatcatccttggctaacatttgtatttttcttttttattcatgtatttatttacttttcagatggagtctcgctgtcgaccaggctagagggcagtggcacgatcccggctgactacaacctgtacctctcaggttcaagcaattctcctgcctcagcctctggagtagctggaattacaggaacacaccaccaggcccggctactttttgtattattattattattattattttttttttttttcactaaagagggggtttcaccatgttgtccagagaatacaagcatgagccactgcgcagccatcaacaccttttactgcatggaaattattctggcactggtatagaacctcacatggggtcaggtggagttgaggggacctcagtgtccctgcagatgggatgagcaagagcacggaggtggagtgcatggggcttcagtgtttattggggaaatgaagctgaaatcttgggtgcatgaccaggaaataaatgcatgagacaggggtctcactgtgccgccctggctaaagtggtcttagatcctcctgcctctgcccctccccagtcctaggtagatgggactacatgtgaatattaacccatgcacagacaagaagaaagtaaggactgttattttgttcgtacccagcccccagttaaatttatcatatatataatatatcatatatataacataatcatatacacacaaaatgctgatttgaatacagagaatactctgatatcactttgggtattttttggtttgtttctgtgtgtgtgtgttttatttgtttggttggttatttttgagacaaggtctggctctatcacccaggctggagtgtagtggtgcgttctcagctcactgcaacctccgccttccacctaagcctgctgcattagtgtctacaggcatgcaccaccacacccggctcacttttgtattttttgtacacatggggttacaccatgttgccggggctggtctcgaactcctgacctcaggtgattctcccgtcttggcctcctaaagtgctagaattagaggtgtgagccaccgtgccccacctgtacttgtgtatttatgttaaaattgtgttaaggagtttttatgaccaagcctgtgatctattctggagaatatttgtgcgtatgacaatgtatattcttcaacatcgtagattccattttggatgctcccactgggactgtgtgcctatactggaactcaagtgaacacttggctcaaaatccattgctgttctctagaaatccagcccaattctcttggttaaatataaggtatgtgtagtaggcattgctttttctttctagagacaaaactcaggaggattgccccttgatgaacaaggtaacctgctgattctttgaaacaagaaactggagatggttcctttaggggtttatgttctggattccaggaaacatgcaaacagggcccacaaatgcatctttatgtttgtgtccattttaacctggtcgaagaacattccaacaaaaaatccaccatgcaccgagcaagaatatctcaggctgtgaccatctggaggtaagaagcactttctgttttgtgaaagaaaagaaagtgcttcctttcagagggttactctttgagaaaagcaacgttgaagttgatgctgatcttggtaatacatttggagagcatgcttatcatcagacgtggatgacggttgggttttgtttttgttttattttttatcttaggcagggtctctgttgcccaggctggagtgtgttggcacttccaacctagatctcttggtcttaaatggtcctctttttggggggcggagtctcactctgacccaggctggagtgcaatggcaggaactcccctcactgcaacctccacctcccgggttcaagcgattctcctgcctcagttttccgagtcgctaggattacaggctcactcctccacacctggctaatatttgtagttttctttattattcatttatttatgtgtttttgagaaggagtctcgctgtcgcccaggctggagtgcagctgcacaatctcagctcactgcaacttctgccactggagtaactgggatttcaggtgcgtgccaccacacttggccaattttttatgtgtgtatttttagacccggggttttcccatgttggccaggctggtctggaactcctgacctcaggtgacccatgcacctcggcctcccagagtgctgggattacaggcatcagccaccgcacccggccctgtctctgacttttgcgaactgaggaagtaaccttttgaaatttactctgaagtgtgaatgattttagcatattttcaaccaccaacattctagttcaggagattttcatcaccccaaagaggcttattcccatttgcagtcagttcccaccccactcttccacccagaccgtgacaaacactttgcatctctctagctctggatctgcctcttgtgggcatgtcacatagatcagttttgaataggtggcctgttgtgaccactgtaattgaggataatgggttggtcctggttgtctgcagtgtgaatcttaccactgaagggtggtccctggatggaagcaggaggctgggagaactgggcggaacatcctttgggaatggagtcgggcgggcagaccctgatgcctgggaagctcacaagggtggaagaccacatcttcctccctgagaactgcaaggtgaccctcctggggtactggaaggagtgaaggcctctggactgggaacaccagggcattgcaccggtgcaggcaggatgagccaaggggaacggagagccaggcatcgctaactggcgacaatttgggtttgatctggacggagtctgtgtcttctggtagagagaacccctgggattttcgctctgctcctggctgtctttcagtcatggaatctgatgacaaagactcccgcccagagccaagacatttggtttctggaccccagtggtcctttctgcctggacttgggatcttttggggaagtttgggatctggcagggcatctgcataatccatagaaatccctgagagtcccttccctttgctgacatctccatgttcctacctattagcttccaaaggagactcctatctgaattgccgaaggcagcttcccaggccagggatacccagttaaatttgtatttcagatcaatagtatatttcagatgtacttgaacaagaaatgatttgctgtttaggtgtgggcatttgtatttccccctttttttttttttttttttttttttgacagagttttgctcttcttacccaggctggaatgcaatggcacaatcttgactcactgcaacctccacctcccaggttcaagcgattctcctgcctcagcagcccgagtagctgggattacaggcatgcgccaccacacccggctcagtttttgcatttagtggagatgggggttcaccatgttagccaggctggtctcaaactcctgacctcaagtgatttccctgcatcggcctcccaaagtgctgggattataggcatgagcctccacgcctagcctcaagtggtcctcttgagtcaacctagactacagtctatgctagagaatgtttgtgtgtgtgacaatgtatgttcttgaacatcatagattccactttggatgctcctgtcgggactgtgtgtccctgtgctggaactcaagtgagagttggctgaaaatccattgctgttctctagaaatccagcccaagtctcttggttagagataaggtatgtctagtgggcattgctttttctttttggggacaaaactcagaaggattgccccttgatgaacaaggctaacctgctgattctttgaaggaaggaactggagatggtcttttaggggtttatattctggattccagaaaacttgcaaacagggccaatacatgcatctttatatttgtgtccgttttgaactggttaaggaaaatttcaacaagaaacccagagtgccggagcaagaagatctcaagctgtgggtctgcaaagggaagccctttctgttgtctaaaagaagagaaagcgcttccctttgctggattacggtttgagaaagcgacgttgaagttgatgcatttgcagagcatgcttatcatcaggcttggacaatggcggggttctgttttggttttgctttttcattctaagacaggatctctgttgcccaggctggagtgcggtggcagtggcatgtccaacctagccctcttggattcaaatggtccttttttgcaagcaaagtctctctctctcacccaggctggagtgcagtgatgtgatctcggctcgccgcaacccccgcctcctgggttcaagcgattctcctgcttcagcttcccaagtagctgagattacaggcacccatcaccacacctggataatatttgtatttttaaaaattcatttatttatttatgagacggagtctcgctgtcacccatgctggagggcagtgacacgatctcggctcactgcaatctctgcctcctgggttcaagcaattcttcctcagcctcctgactagctggaattacaggagcacaccaccgcacctggctactttttgtattttttttttagtagaaatgggatttcaccatgttggttagactggtctcaaactcctgacctcaagtcatccgcccacctctgactctttctgggattgcaggtatgcgcccccacgcctggcctaatttttgaatgtttagcagagatggggtttcaccatgttggccaggctgaactcagctcctgaccttaggtgatctgcctgcctcggcctcccaaagtgctgagaatacaggcgtgagccaccgcgcctggccatcaacaccttttaccccacagaaattattctggcactggtttatggaacttcacttggggtcaggtagaggtgaaggggaccccaatgtcccttgcagatgggatgtgtactgctcagcaagagcatggaggtggagtgcatggggtttgagttttcattggggaaatgaagctgaaatcttgggtgcatgaccaggtcgtatatgcaacgagacgggcgtctcactatgccgcccaagctaaagtgggcttagatcctcctgcctctggccctccccagtccttagtagctgggactacatgtgaatattaactcatgtacaggaagaggaaagtaaggactgttctttgattcatgccccacccccacttaaatttctatttcagataaacaatgtatttgagatgtacttgaacaacaaatgatttgctgtttaggtgtgggcatctttttttgttcctaattttaagtataggacaaggctgggtaccacggctcacacctgtgattccatcattttgggaggccaagacaggaggatcacctgaggtcagttgtttgagaccagcctggccaacatggtgaatccccatctctactaaaaatacaaaacttagcccagtgtggtggtggtacacgcctgtaatcccagctactcaggaggctgaggcaggagaatcacaggaagccgggaagctgagctctcagtgagctgagatcgcaccactgaactccagcctaggcaacagtgagactcaatctcaaaaaaataaaaaataggccgggtgcggtggcacacgcttgtaatcccagcactttgggaggtcgagacgggtggatcacctcaggtcagagttcaagagcagccccgccatcaagacaaaacctcctctctactaaaaatgcaaaatatagctaggcgtggtggtacacacctgtagtctcagctacgtgggaggcggcagcaggagaatctcttgaacccgtgagaaggagattgcagtgagctaaaatcacaccattgcactgcagcctgggcgactccatctcaaaaaataaatacataaataaataaatacataaatacataaaaaataacccagagtactggagcaagaagatctcaggcagtgaccctctagatggaagcactgtctgttgtctaagaaaagatcgtgcatccttttagagtgttactgtttgagaaaatcaacgttgaagatgctgctgatcttggtaacacatttgcagagcgtgcttatcatcagacgtgcatgatgttggggttctgtttgttttgttttttttttccaagacagtgtctctgttgcccagactagagtgggtggcacctccaaccgagatctcttgggctcaagtggtcctctttttattttttgattttttgagacccactctggtttcactgggagtgcagtagcagaatctctgttgaccggaaactccacctctcaggttccagtgtttctaccacctcagcctgccgaatcattgggaattcagttgcctgccatcaggtcttgctaattattattgtttttttgttttttttttttgaggcggagtttcgctcttgttgcccaggctggagggcaatagcgcgatctcggctcaccgcaacctcggcctcccgggttcaagtgattctcctgcctcagcctcccagatagctggaattacaggtgcctaccaccccacccagctaatttttgtgttttcagtagagatggggtttcaccatgttgggcaggctggtctcaaactcctgacctcaggtgatccaccagccttggcctcccaaagtactgggattacagctgtgagccatcacccctaatctcaaatggtcctgtagagtcagcctagactgtggtctatcttggaggatgtttgtgtgtgagacaatgtatattcttcaacattgtagattccattttggatgcttccatcgggactgtgtgcccctgtcctggaactcagctgaacacttggctcaaaatccattgctgttctctggaaattctgccctaatctcttggttaaatataaggtatgtgtagtaggctttgctttttctctttggggacaaaactcaggagggttgccccttggtgaacaaggctaacctgctgagcctttgaagcaaggaactggagatggtccttttaggggtttatgttctggattccagaaaatatgcaaacagggccaataaatgcatctttattttgtgtgtattttaacctggtcaaggaaaattccaacaagaaacccagagtgctggagcaagaagatcccatgctgtgaccctctagaggaagcactttctgtttgttgtctgagaaaaaacaaagtgcttccctttagagttactgtttgggaaaagcagtgttgaagttgatgctgatgttggtaatatatttgcatgcttatcatcagacttggatgatgttggggttctgggttttttttgttttctaagacagggtctctgtggcccaggctggagtacagaggcacttccaacctaggtctcttgggctcaaatggtcctttttgggacagagtcttgctctgtgactcaggctggagtgcagtggtgcaatctcagctcactgcaccctccacctcctgggttcaagtgattctcctgcctcagcttcctgggattacaggcacctgacatcatgcccagctaatatttgtatttttcttttttattcattcatttatttattttttaggtggagtcttgctgttgccaagtctggagggccatggcacgatcccggctgactccaacctctgtctctcaggttcaagcaattctcctgcctcagcctcctgagtagctggaattacaggcgcttaccaccacgcctgactgcttttcgaatgtgtgcgtatgtgtgtgtatgtgtgttagagagaaagagagagagagagatggagtttcactcttgttgcccaggctggagggcaatgacatgatctcggcccatacaacctcagcctcctgggttcaagtgattctcctgcctcagcctcctgagtagctaggattacaggcatgtgccaccacacctggctaattttgtatttttagtagatatggggcttccccatgttggtcaggctggtctcgaactcctgacctcaaatgattcacctgcctcagtctcccaaagtgctgggattacaggtgtgagccaacatgcccggcctgaattttttttttttttttttttttttcaagtaaagacggggtttcaccatgttgaccaggctggtctcaaacctctgaactcacgtgagctgctcgcctcggcctcccaaaggcatgagccatggtgcgtggccatcaacacctcttactttatcgaaatttttctggcactggtatagaacctcacgtggggtcaggtggagttgaagggacctcagtgtccctgcagatgggatgagcaagagcacggaggtggagtgcatggggcttcagtgtttattggggaaatgaagctgaaatcttgggtgcgtgaccaggaaataaatgcatgagacgggggtctcactatgccaccctggctaaagtgggcttagatcctcctgcctctgccccccgcagtccttgctagatgggactacatgtgaatattaacccatgcacagacaagaagaatgtaagaaccattatttggttcacaccgggccctcagttaaacttgtattttagacaaacaatgtatctgagatgtccttgaacaacaaatgatttgctgttcaggtgtgggcatctttgttttttccctaattttaatgatgggactagtctgggtacggtggctcccgcctgtaattccagcactttgggaggctgagataggaggatcacctgaggtcagttgtttgagaccagcctcgccaacatgatgaaacctcgtctgaactaaaaatatagatattagccagacggggtggtggtgcacccctgcaatcccagctactcaggaggctgaggcaggagaatcacttgaagccaggaggctgagctttcagtgagctgagattgagccactgcactccagcctgggcaacagagtgagactcagtctcaaaaaagtaaaaaataggctgggtgtgggccgggcgcggtggctcacgcctgtaatcccagcactttgggaggccgaggtgggtggatcacaaggtcaggagactgagaccatcctggctaacacggtgaaaccctgtctctagtaaaaatacaaaaaaaaaaaaaaaattagccagacgtgatggtgtgcgcctgtactcctagctactcagaaggctgaggcaggagaatggcctgagcccgggaggcggagcttgcagttagctgagatcgcaccactgcactccagcctgggtgacagagcaagactccgtctcaaaaaaaaaaaaaaaaaaaaaaaggcggggtgtggtagtgcacatctgtaatcccagcatttcgggaggccaagacaggaattacctgaggtcaggagttcaagaccaacagggccaacatggcaaaacctcgtctctactaaaaatacaaaaattatctgggtgcagtggtacacatctgtaattccggctacccagaggctgaggcaggagaatagcttgaacccaggaggaggagatttcagtgagctgaaatcacaccattgcacttcagcctgggccacagagcaagattgtgtctcaaaaataaataaataataaaaatgacataaaatcaataaataaaaataaatacataaatacaggaacatcattaatttggatgtcacctttgtgcaggggccagggtaatctctgtcattccaattttttttatgtgcactgccaaagcaagcactcatgtaggaattatccttcctgtgagcatataatatatggaacattctttgagacagggtctcaaaaatatgatgtgtatttcatcatatatataatataatcgtatacacacaaaatactgtttaaatacagagaataccctgatatcaccttgggtatttttctttgtttctgtgtgtgtgtgtgtgtgtgtgtgtgtgtgtgtgtgtgtgtttgtttggttatttctgagacaaggtctggctctatcgcccaggctggagtgtagtggtgtgatctcaactcactgcaacctccgccccccacctaaacctgctgaattagtgtctacaggcatgcaccagcacacctggctaacttttgtattttttgtacatatggggttacaccatgttgccggggctggcctctaactcctgagctcaggtgatcctcccgcctcagcccctaaagtgctgggattagaggtgtgagccaccgcaccccagccatacttgtgtatttctattcaaattttattgaggagtttttaccgcccagcctgtggtctatcctggagaatgtttgtgtgtgcgacaatgtatattcttcaccatcgtagattccgttttggatgctcccatcgggactgtgtgtccctgtgctggaactcgagtgaacacttggctcaaaatccactgctgttctctagagatctgtagggtccagccctactgggcctgtgggtttttctcttcgtgagcagataggagagattgtagaaataaagacacaagacaaagagagagaagaaaaggcagctgggcctgggggaccactaccaccaagacgtggagaccggtagtggccccgaatgcgtggccgcgccgttatttattgtatacgaggcaaaagggcagggtaagaagtgtgagtcttctctaatgataggtaagatgacgcgagtcacgtgtccaccggacagggggccccttccctatttggtagcttaggcggagagagattggggacagcttacgtcattatttcttctatgtatttctcggagagatcaaagactttaatactttcacttattctgctaccgttatctagaaggcggagccaggtgtgcagagcggaacgtgaaagtggaccaggagcgtgaccgctgaagcacagcatcacagggagacgtttaggccaccagacggctgcgggcgggcttgactgatgtcaggctttccacaagaggtggtggagcagagtcttctctaactcccctggagaaagggagactccctctccgggtttgggaaggtaagggggtccttcccaggcactggcgctaccgctgtgctaagtgacgggtgccttccccctggtgttaccgctggaccagggagccctctagtggccgtgtccgggcatgacagagggctcacgctcttgtcttctggtcgcttctcaccgtgtcccttcagctcctatctctgtatggcctggttttccctaggttatgattgtagaacaaagattattataatattggaataaagagtaatgctacaaactaatgattaataatattcatatataatcatatctataatctatttctagtataactagtcttattctatatattttctttgttatactggaacggcttgtggtgagtttctttattataccggaacagcttgtgccttcggtctcttgcctcggcacctgggtggcttgccacccacagaaatcctgcccgtttctcttggttaaatataatgtatttctagtaggcattgcttcttctttccagagacaaaactcaggaggattgtgctatgataaacaaggctaacctgctgattctctgaagcaaggaactggagatggtccttctaagggtttatattctggattccaggaaacatgcaaacaggacccataaatgcatctttattttggtgcccattttgacctggtcaggagaattccaacaaaaaatccacggtgttggagcaagatctcaggctctcaggctgtggccatctagaggtaagaagcactttctgttgtcttaaagaaaagaaagtccttttttttttttttttttttttttgagacaatgtctcgctctgtcgcccaggctggaatgcagtggcgtgatcttggctcactgcaagctccgcctcccgggttcatgccattctcctgcctcagcctcctgtgtagctgggactacaggcgcccgccaccaagcccggctaattttttgtatttttagtagagacggggtttcatcttgttaggcaggatggtctcgatctcctgacctcatgatccacccgcctcggcctcccaaagtgctgggattacaggcgtgagccaccacgcccgcccagaaagtgctttctttcagagggttacggtttgagaaaagcagcattgaagttgacgctgatcttggtaatacatttgcagagcatgcttatggtcagacgtggatgatggtggggttttgtttttgttttgttttttatctgagacagggtgtctctgttgcccaggctggagtgcagtggcacatccaacctagatctcttgggctcaagtggtcctctttttgaaacagagtctcactctgttaccctggctggagttcagtggcaggaacttggctcactgcaatctctgtctcctgggttcaagcaattctctggcctcagcctcccgagcagggttacaggcatgtgccaccacgcccggctaatttttgcatttttttaattgatttatttgtttgttgttgagacagtctcactctgttgcccaggctgtagtgcagtggtgtgatctcagctcaccgcaacctccacctcccatgtcagcctcctgaatacctgtctccaggcatgcacccccacacctggctaacttttgcattttttgtacagatgaggtttcaccatgttgcccaggctggtcttgaacccctgagctcaagtggtcctcccacctcggcctcctaaactgctgtgattaatggtgtgagccaccgtgccacacccgtacttgtttgtttctgctcaaattgtattgaggagcttttacatcctagtctgtggtctatcctggaggatgtttgtgtatataacaatgtacattttcaacattttagattccattttggatgctcccatcgggactgtgtgtccctgtgctggaactcgagtgaacacttggctcaaaatccattgctgttctctagaaatcctgccctattctcttggtgaaatataaggtatgtctagtcggcattgatttttctttctggagacaaaactcaggagggttgcccctgcatgaacaaggctaacctgctgagcctttgaagcaaggaactggagatggtttttttaggggtttatattctggattccagaaaacatgcaaacagggacaatgaatgcatctttatttttctgtccattttaacctggtaaacgaaaatttcaccaaaaaacccagagtcctggagcaagaagatctcaggctgtgaccctccaaagggaagaactttctgttgtctaaaagaaaagaacgcacttccctttagagtgttaccgtgtgagaaaagcaacgttgaagctgatgctgatcttggtaataagtttgcagagcctgcttatcatcagacttggacgacggtgtagttctgttttggttttgagttttttgtttgtttgttttgttttgcttttgagatggaggcttgctctgtcgcccaggctggagtgcagtggcgtgttctcagctcactgcaacctccgcctcccaggttcacgccattcttctgcctcttgagtagctgggactacaggcgcccgccaccacgcctggctaattttttgtatttttagtagacacagagtttcactgtgttagccaggatggtcttgatctcctgaccttgtgatccacccgccttggcctccaaaagtgctgggattacaggcgtgaaccactgcgcccggccttaatttttgtatttttagtagagacaggaggctgagctttcagtgagctgagttcgttccactgcactccagcctgggcaacagagtgagactccatctcaaaaaaataaaaaataggccgagcgtggtggcacatgcctgtaatcccagccctttgggaggccgagacaggtggatcacctgaggtcaggagttaaaggctggctgggccaacaaggcaaaacctcgactctactaaaaatacaaaattacacctgtaatcttagctgcttggggggctgtggcagaagaacctcttgaacccaggaagaggagattgcagtgagacgaaatcataccattgcactctagcctgggcgacagagcgagattctgtctcaaaaaataaataagtagggcagacagggtggctcacgtctgtaatcccagcactttgggaggcaaggcgggtaaatcacaaggtcaggagttcgagaccagcctggccaacatggcgaaaccccatctctactaaaaatacaaaaaagtagctgggcatggtggctggcacctgtagtcccagctacttgggaggctgaggcaggagaatcgtgtgaacccaggaagcggaggttgcagtgagccgagatcgggccattgcactccagcctgggcgacagtgcgagactctgtatcaaaaataagtaaataaataaacaaaataaaagtaaaaagaattaaatagataaatatggtaccattatgaatttgagtgtcacctttgtgcaggggtcatggtaatctttgttatttcaatttttttatgcgtattgccaaagcaagcacatatgcgtaggaattatacttcctgtgagaatacaatatatggagctttcttttttgttttttctgtttgtttgttttttgagacacagtttcactcttgttgcccaggctggagtgcaatgtcacgatctcagctcacggcaacctctgcctcctgggttcaagcgattctcctgcctcagcctcccaagtagctgggattgcttgcatgtgccaccaagcctagctaattttttgtatttagagtagagatggggtttctccatgttggtcaggctggtctcgaactcctgacctcagatgatccatccacctcagcctcccaaagtgctgggattacagatgtgagccaccatgcccggccatgatatatttttatatatgtaatatcacatacacacaaaatactcttctatgcacagagaatagtcttatatcactttgggtatttgtgtgtgtgtgtgtgtgtgtgtgtgtgtgtgtgtgtgtgtgtgtgttttgtttggttggttatttttgagacaaggtctggctctgtcatccaggctggagtgtagtggtgtgatctcagctcactgcaacctccacccccgacctaagcctactgaattagtgtctacaggcacgcactaccacacctggctcacttttgtattttttgtacacatggggtttcacaatgttgccggggctggtctcaaactcctgtgctcaggtgatcctcccatcacggcctcctaaagtgctggaattagaggtgtgagccgccacgccccacctgtacttgtgtatctctgttcaaatgttactgaggagcttttacagcgtaacctgtggtctatcctggaaaatgtttgtgtgtgagacaatgtacattcttcaacatcttagattgcagtttggatgctcccgtcaggactgtgtgtccctgtgctgggactcaagtgaacactgggctctccatccattgctgttgtctagaaatccagcccaattctcttgggtaaatatgaggtatgtgtagtaggcattgctttttctttctggagacaaagctcaggaggattgccccttgataaacaaagctaacctgctgattctttgaagcaaggaactggagatggtccttttaggggtttatattctggattccagaaaacatgcaaacaggaccaataaatgcgtgcttatttttgtgtctgttttaacctggtcaaggaaaattccaacaaaaaatccacgatgctggagcaagaagatctcaggctgtgtccctctagagggaagcgctttctgttgtctgaaagaaaagaaaatggttccctttagagtgttacgctttgagaaaagcatcgctgatcttggtaacacatttgcagagaatgcttataatcagacgtggatgatgttgaagttttgcgtttgttttgttttgttttttttcctagacagggtgtctgctgcccaaactggagtgcggtggcacttccaacctagacctcttgggtttaagtggccctctattttgggatagagtcttgctctgtggccctggctggagtgcagtgtcaggaactctgctcactgcgacctctgcctcctaggttcaagcgattctcttgcctcagcctcctgagcagctgggattacgggcatgtgccaccatgcctggctaatttttgtattttttattatttatttatttatttatttttgagacagagtctcgctctgtcacccaggctgaagtgcagtggtgcgatcttggctcaccgcaacctctacctcccacctcagcctcctgaacagctgtctccaggcgtgcaccaccacacctggctaacttctgtatttgttttacagtcatggtttcaccatgttgcccgggctcatcttgaactcctgagctcaagtgatcctcccgcctcagcctcctaaagtgctgtgagccaccgtgtcccaacagtacttgtgtgtttccgttcaaattgtattgaggagcttttacagcatagcctgtggtctctccgggagaatgtttttgtttacgacaatgtatattcttcaacatcgtagattccattttggatgccctcattgggactgtgtgtccctgtactggaactcaagtgaacacttggctcaaaatccattgctgttctctagaaatccagcctaattctcttggttaaaggtaaggtatgagtagtaagcattgctttttctctttgggaacaaaactcaggaggattgccccttgatgaacaaagctaacctgttgattctttgagggaaggaactggagatggtccttttaggggtttatgttctggattctagaaaacacacaaaccggacaaataaatgcatctttatttttgtgtctattttaacctcgtcaaggaagattccaacaaaaaatccacagtgccggagcaagaagacctcaggctgtgacactctagagggaagcgctttctgttgtctgaaagaaaggaaagtgcatccttttagagtgttactgtttgagaaaagcaacattgaagctgatgctgatcttggtaataaatttgcagcgaatgcttataatcagacttggatgatgttgggcttctgagtttttttttgttttgttttgtttagttttggggtttttctgttttttgttttttgttttttttttttttgaggccgagtcttgctctttcgcccaggctggagtgcagtggcgctatctcggctcactgcaagttctgcctcccgggttcacgccattctcctgcctcagcctcctgtgtagctgggactacaggtgcccgccagcacacccggctaattctttgtatttttagtagagacggggtttcaccgtgttagccaggatggtctcgatctcctgacctcgtgatccacccgcctcagcctcccaaagtgctgggattacaggcgtgagccaccgcgtccagccttgttattgtttttgagactgagtcttgctctgtggcccaggctggagcgcagtggcgtgatctcggctcactgcaacctccatctcccaggctcaagcaattctcctgcctcagcctcctgagtagctgggattacaggcctgtgccaccatgcccggctaattatttgtatttttagtagagacagggtttgcaccatgttggccaggctggtctcgaactcctgacctcaggtaatccacccacgtcgatctcccaaagtgctgggattacaactgtgagccactgcgcccggcctgtttttctctaccacagggtgtctgttgcccaggctggagtgcggtggcatttttaacatagatctcttgggctcgagtggtccttttttttggttcagtcttgctttgtgacccaggctggagggcagtggcagaaactctcctcactgcaacctccgcctcctaggttcaagccattctcctgactcagcctcctgagcagctgggattaccggtgtgagccaccacacccagctaatttttgtatttttatttatttgtttatttatttatttattgttgagacggagtcttgctgtgtctcccaggctggagtgcagtggcgcgatcgtggcttactgcaacctcctcctccttggttcaaccaattctcctgcctcagcctcctgagaagctaggattacaggcatgcaccaccatgcctggctaatttagattccattttggatgctcccatcaggactgtgtccctgtactggaactcaggtgaacacttggttcaaaatccgtcgcttttctctagacatccagctcagttctcggtaaagataaggtatgtgtagtaggcattgctttttccctttagagacaaaactcaggaggattgccccttggtgaacaaggctaacttgcagattctttgaagcaaggaactggagatggtccttttaggggtttatgttctggattccagaaaacatgcaaacagggccaatacatgcatctttatttttgtgtccgttttgacctggtcaaggaaaatttcaacaagaaacccagagtgccggagcaagaagatctcaagctgtgactgcaaagggaagccctttctgttgtctaaaagaaaagaaagtgcttccctttggtgaattacggtttgagaaaagcaacgttgaagttgatgctgatctcggtaatacatttgcagagcatgcttatcacacttggacggtggtggggttctgttttggttttgcttttttattctaagacagggtctgtgttgcccatgctggagtgcggtggcacatcccacctaggtctcttggattcaaatggtcctttttgggggcagagtctctctatcaccgaggctggagtgcagtgatcccatcttggctcactacaacctccgcctcccaggttcaagcaattctcctgcttcggcctcccaagtagctgagatttacaggtgcccatccccacacctggataatatttggttttattcatgtatttatttatttttaagatggagtctcactgtcacccagactggagggcagtggcacgatctcggctcgctgccacctgcgcttccctggttcaagtaatgcttctgccttagcctcctgagtagctggaattacagaagtacaccaccacacctggctactttttatatttcatttttaatacagactggatttcaccatgttggctagtatgatatatattttgtcatatattcttatatatataatcatatacacacaaaatactcttctgcacacgaagagtattcttatatcgctttgggtttttttgtttgtgtgtttgttttgtgtttgtttctttgtttttgagacaacgtctggctctgttgctcaggctaaagtgtagtattgcaagctcagctcactgcaacctccacctcccacctaaagtcccctgaattagtgtctacaggcatgcaccaccacacctggctcacttttttttctgagaaggaattttgcttttgtcgctcaggctggagtgcaatggggtgatttcagctcactgcaacctctgactcccggcttcaagcaattctcctgcctcagcctcccaagtagctgggattacaggcatgcaccaccacacctggctaattttgtatttttagtagagatgggtttcaccttctttctcaggctggtcttgaactcctgacctcaagtgatccacctgcctcgacctcccaaagtgctaggattacaggtgagagacattgcacctggccacctaacttttgtagtttttttacagacagggcttcaccatattgcccaagctggtctccagctactgagctcaagtgatgctcctgtctcggccactgtccctcacccaaacttgtgtatttcttttcttttctttttttttttttttttttgagatggagtctggctctgtcacccaggctggagtgcagtggcacgatcttggctcactgcaagctccgcctccccagttcatgatatttttctgcctcagcctcccaagtagctggcactacaggcacccgccaccacgcctggctaattttttgtatttttagtgaagacggggtttcactggattagccaggatggtcttgatctcctgagctcgtgatctgcctgccttggcctcccaaagtgctgggattacaggcttgagccaccgcacccagcttttttgtttttttgttttgtttttttgagatggggtctcgctctgtcacccagcctggagtgcaatggcacgatctcggttcactgcatcctacccctcccgggttcaagcgattctcctgcctcatcctcccaagtaactgggattacaggtgcccaccaccgcgcctggctaattttttgtatttttagtagagacggggtttcaccgtattagccaggatggtcttgatctcctgacctcgtgatctccctgcctcagcctcccaaagtgctgggattacaggtgtgagccactgcacccggcctttttttttttttttttttttttgagatgggatctcgctctgtcacccaggctggagtgcaacggcatgatctcagctcacggcaacctccccctcccgggttcaggtgattctactgcctcagcctcccaagtagctgggattacaggtgcccacgaccacgcctggctaattttttgtatttttagtagagatggggtttcatcaaggtggccaggctggtctcaaactcctgacctcatgatctactggcctcggcctaccgaagtgctgggattacaggcatgagccaccgcgcccagcttctgtatttcttttcaaattttattgaggattttttatgtcctagcctgtggtctatcctggaggatgtttgtgtgtgagacaatgtatattcatcaacatcttagattccattttgattgcttccgtagaaactgtgtgtccttgtgctggaactccggtgaacacctggctcaatatccattgctcttctctagaaatccagcccagttctcttggttaaatataagatatgtgtagcaggcattgctttttctttccagagacaaaactcaggaggattgccccttgatgaacaaagctaacctgctgattctttgaagcaagtaactggagatcctccttttaggggtttatattctggattccagaaaacatgcaaacagggccaataaatgcatctttatgtttctgtccattttaacttgatctaggaaaattccaacaaaaaacccacggtgctggagcaagatctcaggctgtgaccttctcgaggaaagaagcactttctgttgtctgaaagaaaagaaagtgcttcctttcagagggttacggtttgagaaaagcaacgttgaagttgacgctgatcttggtaatacatttgcagagcgtgctgatcatcagacgtggataatggtggggttttgttttttatctaagacagggtgtctgttccccaggctggagtgcggtggcacttccaacttagatctcttgggttcaagtggccctctttttgggacagagtctcactctgtggccctggctggagtgcagtggcaggaacttggctcactgcaatctctgcctcctgggttcaagcaattctcctgcctcagcctccggagcagctggggttacaggctgtgccaccatgcccagctaacttttgcatttttattattgatttattgatttatttttgagacagggtctggctctgtcacccaggctatagggcagtggtgcgatctcggctcactgcaacctccacctcccacctcagcctcctgaatacctgtctccaggcatgcactaccacacctgcctaacttttgtattttttgtatagatgaggtttcaccatgttgcccaggctggtctcggacccttgagctcaattgctcctcccgcctgggcctccaaaactgctgtgattaatggtgtgagcaagcgtgccctactcttgtgtgtttctgctcaaattttatggaggagcttttacatcccagcctgtggtctatcctggagaatgtttgtgtgtgtgacaatgtatattcttcaacattttagattccatttggatgctcccatccggactgtgtgcccctgtactggaactcaagtgaacacttggctcaacatccattgctgttctcatgaattccaggccaattgtcttggttaaagacaaggtatgtgggctgggcgtggtggctcatgcctgtaatcccagcactttgggagaccgaggtgggaggatcacgaggtcaggagttcgagacaagcctgaccaacacggtgaaacccatctctactaaaaatacaaaaattagctgggcgtggtggctccaccagtaatctcagctacttgggaggctgaggcaggagaattgcttgaacccaggaagcggaggttgcagtgagctgagatcgcgccactgcactccagcctgggtgacagagcgagacttcatctcaaaaaataaaaaataaaaaggtatgtgtagtaggcattgctttttctctttgtagataatactcaggaggactgcctcttgaacaaggctaacctgctgagcctttgaagcaaggaactggagatggtccttttagggggttatgttctggattccagaaaacatgcaaatagggacaatgaatgcatctttatttttctgtccattttaacctggtcaaggaaaatttcaacaagaaacccagagtgctggagcaagaagatctcaagctgtgagtctacaaaggaaagcgctttctgttgtctgaaagaaaagaaatcgcttccctttggagtgttacggtttgagaaaagcagcgttgaagttgatgctgatctcggtaatacatttgcagagcatgcttatcacacttggacggtggcggggttctgttttggttttgctttgttattctaaaacagggtctgtgttgcccatgctggagtgcggtggcacatcccacctaggtctcttggatttaaatggtcctttttgggggccagagtctctctctgtcaccgaggctgaagtgcagtcatcccatcttggctcactacaacctccgcctcccaggttcaagcaattctcctgcttcagcttcccaagtagctgagatttacaggcgcccatccccacacctggataatatttgggttttttttttatttatttttaagatggggtctcaccgtcacccaggctgtagttcagtggcttgatctcggcttactgcaatgtatgccacccaggatcaagtgattctcctgccccagactcctgagtagctggaattacacgcacctgccactacacccggctactttttgaatttttttttttttttttaaagtaaagatgggctttcaccatgttggccaggctggtctcaaacccctgacctcaagtcagctgcttgcctcagcctcccaaagtgctgagaatacaaacatgagccactgcgtggccatcaacacctcttactttatggaaatttttctggcactggtatagaacctcacgtggggtcaggtggagttgaggggacctcagtttcccttgcagatgggatgtgcactgctcagcaagagcacagaggtggagtgcatggggcttcagtgtttattggggaaatgaagctaaaatcttcggtgtgtgaccaggagataaatgcatgagatggggatctcactatgctgcccaggctgaagtgggcttagatcctcctgcctctgcccctccccagtccttggtacatgggactacatgtgaatattaaccccccatgcacagacaagaagaaagtaaggactgttctttggttcatacctgaccccagttaaacatgtattttagataaacaatgtatttgaaatgtacttgaacaacaaatgatttgctgtttaggtgtgggcatctttttttttcttcctaactttaaatatgggactagtccaggtacggtggctcatgcctgtaattccagcactttgggaggcggagacaggaggatcacctgaggtcagttgttcgagaccagactggccaacatggtgaaacctcgtctgtactaaaaataaaaaaattagtgagacgtggtcttggtgcatgcctgtaatcccagctactcgggtggatgaggcaggagaattgcttgaggctgggaggctgagctttcagtgagctgagatcaagcctctgcactccagcctgggcaacagagtgagactgagtctcaaaaaagtaaaaaatcagctgggtgcgctggcaaacacttgtaatcccagcactttgggaggccgagacgggaggatcacctgaggtcatgttcaagactaacagggctgaaatagcaaaacctcatctctattaaaaatacaaaaattagctgggtgcagtggtgtatatctgtatttccagctacttggaggctaaggcaggagaatcgcttgaacccaggaggaagagatttcagtgagctgaagccatgccattgcactccagcctgggccacagagcaagattccatctcaaaaataaaataaataataaaaatgaaattaaatagataaaaataaatagataaatatgagaccatcatgaatttggatgtcacttttgtgcaggggccagggtaatctctgtcattccaattttttttatgtgcactgccaaagcaagcactcatgtgtaggaattattcttcctgtgagcatataatatatggaactttgagacagagtctcaaacatatataatgtatattttatcatatattctttatatataaaatatcatatagacacaaaatactgttctaaatacagagaatactctgatatcaacttgggtattttttgtttctgtgtgtgtgtattttgtttggttggttatttttgagacaaggtctagctctatcacacaggctggagtgtagtggtgcgttctcggctcactgcaacctccgcctcccacctaagcctgctgcattagtgtctacaggcatgcaccaccacacccggctcacttttgtattttttgtacacatggggttacaccatgttgccggggctggtctcgaactcctgagctcaggtgattctcctgtcttggcctcctaaagtgctgggattagaggtgtgagccaccatgccccatcggtacttgtgatttaggttcaaattttgatgagtttttatgaccaagcctgtggtctatcctagagaatgtttgtgtgtttgacaattcaacatcgtagagttgattttgggtgctcccattgggactgtgtgtccctgtactggaacttgagtgaacacttggctcataatccattgctcttctctagaaatccagcccaattctcttggttaaatataaggtatgtgtagcaggcattgctttttccttccagagacaaaactcaggaggattgccccttgatgaacaaggctaacctgctgattctttgaagcaaagaactggagatggtccttttagaggtttatattctggattccagaaaacatgcaaacagggccaataaatgcatctttatgttttcgtccattttaacttgatctaggaaaattccaaaaaaaaaaacccacggtgctggagcaagaagatctcaggttgtgaccttctcgaggaaagaagcactttctgttgtctgaaagaaaagaaagtgcttcctttcagagggttacggtttgagaaaagcaacgtcgaagttgacgctgatcttggtaatacatttgcagagcgtgctgatcatcagacatggataatggtggggttttgtttttgttttatttttttatctaagacaaggtatctgttgcccaggctggagtgcggtggcacttctaacctagatctcttgggttcaagtggccctcttttcgggatagagtcttctttgctctgtggccctggctggagtgcagtggcaggaactcggctcaccgcaacctctgcctcctgggttcaagcaattctcctgcctcagcctgtcgagcagctggggttacagacatgtgccaccacgcctggctaatttttgcatttttattgtcgatcgattgattgatttttgagacagagtctggctctgtcacccaggctgtcgggcagtggtgcgatcttggctcactgcaacctccacctcccacctcagcctcctgaatacctgtctacaggcatgcacaaccacaccttgctaacttttgtattttttgtacagatgaggtttcaccatgttgcccaggctggtctcggacccctgagctcaagtactcctcaaacctgggcctcctaaactgctgtgattaatggtgtgagccaccgtgccctactcttacttgtgtgtttctgctcaaattttattaaggagcttttatggcctcgcctgtggtctgtcctggaggatgtttgtgtgtgtgacaatgtatattcttcaacatcttcgattccattttgggtgcctccatggggactgtgtgtccctgtactggaacgcaagtgaagacttggctcagagtccatttgctgttctctagaaatccagcctaatcctcttgtgcaaatataatatatatctagtaggcattgctttttctttctggagacaaaacacaggaggattgccccttgatgaacaggactaacctgctgattctttgaagcaaggaactggaaatggtccttttagggatttatgctctggattccagaaaacacgcaaacagggccaataaatgcatctttatttttgtgtccattttgacctggtcaaggaagattccaacaaaaaatccacagtgccggagcaagaagatctcaggctgtgtccctctacagggaagcgctttctgttgtctgaaagaaaggaaagtgcatccttttagagtgttactgtttgagaaaagcaacgttgaagttgatgctgattttggtaatacatttgcagagcatgcttatcatcagacttggatgatgttgggttctgtttttgctttgtttttttttccaagacagtgtgtttgttgcccaggctggagtgcggtggtacttcccacctagatctcttgggctcaagaggtctttttttatttttctttctcaagagagagtctggtggtgacacccaggctggagtgcagtggtgcattatcagctcactgcagccttcccctccccggttcaagtgattctttcacctcagcctcccgagtagctgggattacaggtgtgggctaccacacccggctaatttttgtatttttagcagagacagggttttaccatgttggggaggctggtctcaactcctgtcctcaagcgatccacctcccttgcctcccaagtactgagattacaggcgtgagcaactgcgcccggcctcaagtggtcctcttaagtcagcctaccaagttttgggactacatggggcatgccaccacacttggctaagtttttaatttttttttttttttttttttttttttttgagacggagtctcactctgtcgcccaggctggagtgcagtggcaagatctcggctcactgcaagctcggcctccggggttcacgccattctcctgcctcagcctcccgagtagctgggactacaggtgcccgccaccacgcctggctagttttttgtatttttagtagagacggggtttcaccctgttagctaggatggtctcaatctcctgacctcgtgatccacccgcctcggcctcccaaagtgctgggattacaggcgtgagccaccgcgcccggccgatagtttttaatttttgatagaaagggaatctctcttgcctaagatggtctcaactcctgagctcaagggatcctaaaggtgtgagccgccttgtcctgatgacccatttcaaacgtagctgacatggccaggcatcatggggcacacagtcccagctactgcagaagccggggtgggagggtcctttgatttccaggctataccatgtgctgatcacacttttgatcccgagtagctgggattacaggcagccaccgccaggccggctaatttttatttatttacttattttttcagacggtgtttccctcttgttgcccaggctggagtgcaatggcatgatctcggatcactgcaacctccacctccctggttcaagcgattctcctgcctcagcctcccgagcagctgggattacaggcatgcatcaccacgcccggctaattctttgtatttttagtagagatgggatttctccatgttggtcaggctgatcttgaactcccaaccttaggtgatccacccacctcggcctcccaaagtgctgggattacaggcatgagccattgtgcccggcccatttcatttatttttatgtgtgctgctgaagcaagcacttatgtgtaggaattgttcttcctgtgagcatatgttggccagcctggaccacataccaagatcccatctctttaaaaacacagattacgtggcacctggcacctggtcccagagacttcatttgggttggtcatttgaaacactagcctcccatcaatttagtgtaatcaatccaaatcatgtgtccttcattaagagactaagaacgcctccacgtctatccagtctattttgtaatccccaacggttgtcaatattaataaaatttcttttctttttcctattcatttgtgtctttagtttttcttccccaaaaacttgccatcatttctcggaatagacctgctttctctgcaggaagggtgtggttgattcaacccttacccactaatgccaaccccagtgagttcttttatcctattttctatgggtaacgattccaaggtaccattccaccgggcaaaagctcacatctaagtgtcagttgctcggtaagatgtgaaatgtttgctgtggctaatataagaaacaaactattgtagacaagatgaatctcagtggcagtgataaatgtcgcacaagacaaaaccacagatcctttttttttttttttttttttttagacaaagtttcactcttgttgcccaggctggagtgcaatggtgcgatctcggctcactgcaacctccgcctcctggaggcgattcaagcgattctcctgcctcagcctcccaagtagctgggattacaggcatgcaccaccacgcccaggtaattttgtatttttagtagagacggggtttcgccatgctggtcaggctggaactcctgacctcagatgatcctcccacctcagcctcccaaagtgctgggattacaggcgtgagccactgtgcccggccaaccacagatactttcacgaaagcctttagggccctagaaggggctccctagtaacaggtgggatgcgaggcagctctcgttgttgccgtagtgagcgatgcctgttcgtccagccctcaacaccttttactccgtggaagttatgcctgcactggtttacagaacctcccttgacttgggttgaggtagagctgaagggaacctcagtgtcccttgcaggtgggatgtgcactgcttagcaagagcacggaggtggagtgcatgggctttgagtttttattgggaaaatgaagctgaaatgtagggcgcatgaccacatcataaatgcacatttgatttaatttttctattttatttttatttatttattttgagatggagcctcgctctgttgcccaggctggagtgcactggcctgatctcggctcactgcaacctccacctcccgggttcaagcaattattgtgcctcagcctcccaggtagctgggattacacgcatgcttccacgcccggccgatttttgtatttttagtagagacggggtttcaccatgttggccaggctggtttcaaaatcctgacctcaagtgatccgcccgcctcggcctctcaaagtcctgagattacaggcgtgagccaccatgaccagcctaatttttctattttagagacagtggtctagctatgccacccgggctaaactaggctttagagatcttcctgcctctgcccctccacggtctctggtagtttggactacaaatgaacattagcatatttgcaaccaccaccactctagtttggaagatttttatcaccccaaagaagcttatacccatttgccttcagtacccacccccctcttccactcagaccctggcaactactctacatctctctagctctggatttgcctcttgtgggcatttcacaaaaaccagtcttgaatgggtggcctgttgtgaccacttttaatataatgggttggttctggttgtctgaagtgtgaatcttgccaatgaaggatggtccctggatggaagcaggaggctgggagaactgggcggaacatcctttcggaatggagtggggtgggcacaccctgatgtctgggaagctcacaagggtggaagaacccatcttcctctctgataactgcaaggtgaccctcctggggcactggatggagtgaaggcatctggactgggaacaccagggcattgcactggtgcaggcaggatgagccgaggggaaaggagtgccaggcatcattctctggtgacagtttgggtttgatctggatggagcaggtgtcttctggtagagagagtccctgggatttttgctctgctcctggctgtctttcagtcatggaatctgatgacaaaggctcccactctgggccacttcatttggtttctggagcccagtggtcctttctgcccggactcaggatcttttggggaaatttgggacctcgcaggacatctgcacaatccatagaaatccctgagagccccttccctttgctgacatctccgtattcctacctattgccttccaaaaaaagacccttatctgaattgccaaagggggcttcccagagcagggaaacccggttaaatttgtatttcagattaacagcatatctagaatctactcgaacaagaagtgatttgttgtttaagtgtgagaaatttttttcccctaattttaaatacggaacccatcatgaatttggctgtcacctttgcgcaggggccgtgggaacctatcatttcattgtttaatgtgtgctgccaaagcaagcacttaagtgtgggaattattcttcacgtgaggatacaatagatggaacgttattacttttttctttcataattgagattttattggttgaagatcggtacagacatttcaatttgtacacaattcttaacatacgtaccgaaaatctaaaaagccatgtattgtaaatcgttttgttttgttttgtttttttgagacagagtttcgctcttgtcacccaggctggagcgcaatgacgcaatctcggctcaccgcaacctccgcctcccgggttcaagcaattctcctgcctcagcctcccaagtagctgggattacaggcaaatgccaccatgcccggctaatttttgtatttttttttttttaagtagagacagggcttctgcctgtcggtcaggctggtctcgaattcccgacctcaggtgatctgcccgcctcggcctcttaaagtgctgagattacaggcgtgagccaccgcacccggccatgtattgtaattcttctacaaagttattccggcgactttccagcttaaaatttggaagcacattttccttaagaggctatcaagtaccagtatcttcacatgttgatcagctgttacggacgtccctccaattcacaactaaaaatagcatgtaccctacatattcaaatttttcatctttcacaacgcagaaacaaacttattaggagaacagaactaccacaatcaaagatgttacagagtccacacaattctaacagggagagccatggtcagggagtggttttctttaggaaacaattccaaaatacgacaggagaatagaagtaatttaaaatgttcaagacactaaatgcagagctgattccatgctgccatttaatatgctttgtattataggatataaacacgaaccctggccgggtgcagtggctcacgcctgtaatcccagcactctgggaggccgaagtgggcagatcacctgaggtcaggagttcaagaccagcctggcccacatggtgaaaccccatccctactaaaaatatgaaaattagccaggcatggtggtgcgcgcctgtaatcccagctactccggatgctgaggcatgagaatcgcttgaacccgggaggtggagattgcagtgaactgaaatcacgccactgccctccagcctgggcgacaagaacaagactctgtttcaaaaaaaaaaaaaaaaaaaaagtttctggaactactaaaaaacttgcatttacaaaatagttgataaaaagattcctctgggttttacaagaagcgagacagggagcactgatgagacgtggtatacggtgaatcagactgggcatcagaggctgggcctcctcagttttcctttccccattttctgcagataaatctttagtttcttggttagccacttctgcccgttttccctttgctcccctttgcccttctgttcacacttttttgtctgaagatgtatccttcgttgctgcctttttcggcttcatttccactggtttttttgttttgttttgttttgttttgtttgagacgtagtttcaccctgttgctcaggctggagtgcaatggcgtgatctcggctcacagcaacttctgccttccggttcaagcgattctcttgcctcagcctcccgagtagctgggcttataggcgcgcaccgccatgcccggcttatttttgtatttttagtagagacgggggtttcaccatgttggccaggctggtctcgaactcctgacctcaggtgatccgcccgcctcagcctcccaaagtgttgtgattacaagcgtgagccaccgcacccggccttgcttccacttttgcaggagcaggtttagctgacaaccgtgcgatctcctcgtgggctcttccttggcggcccctatggcggagctaacctgcctcttgggcatcctggtggcggagagggcgcgtgccggctgtctgcgggccgcggctgccgagagccttggcgaagctgggctgcctggcggctgcggctcctcccgccgcccgagctgctgagacccacagcggggtcggtgggagaaccgaatggaacccgaaactttcttattttgagacaggatctggctctgtcacccaggctggagtgcttggctcactgcaacgtctgcctcaagtgatccttccacctcaacctcccaagtagctgagattacaggcgcgcgtgccactatgcctggctaatttttgtactctttgtagagatgggggtctcgctatgttgcccacgctggtcttgaactcctgggctcaaatgatcctcctggcctggcttcccaaagtgctggttgtaacgccagcagtttgggaggccacagtcggcgggatggattagctagcaacaaacattccaggcagagaatggtgctctctcaactctcagtcagcaaggggctagtatatattgaaggggctcagggcatgtcaccccaaagtcatcgcgtcagcatatggattatttcgacctggaagcctgtgggaaaaagcagatgcatctgacctcccccttcctacgtaaaagtagattgtaaaatttatcaagaggaaaacgcccttcctgcgccaggaagagaagaatgttcctatcagcaggggccaggagtccatatgctaaacaactcagctactaacccttatcttccttaagttccccactgtttcctggtcacttcccctagcccaagcctctttgtcttgtcacatccccacaacttatcattccttttttttttttgaggtggagtttagctcttgttgcccaggctagagtgcgatggcgcaatcttggctcactgcaacctctgcctcccgggttcaagtgattctcctgcctcagcctcccaagtagctgggattacaggcgcccaccaccacgctcggctgattttttgtatttttagtagagatggggttttgccatgctggccaggctggtcttgaactcctgatctccggtgatccgcccgcctcagcctcccaaagtgctgggattgattacaggcgtgagccaccgcgcccggccatcattctcttttttgttttgttgtggttgttgttgtttgagacagcgtctggctttgtcacccaagctggagtgcagtggcgccatctcagctcactgcgacctctgcctcccgggttcaagcaattctcatacctcagcctcccgagtagctggaaccacaggcatgagccaccatgcccggctagttacagggttttcctatgctctccaggctggagtgcagtggcgcaatcatagttcactgcagtcttcaactcctgggctcaagcaatcctcccacctcagcctcttaaactgctgggattacaggtggtagccatcatgccctgccccagagaagtctttaggcttcagccaggcacggtggctcaggccggtaaacccagcactttgggaggctgaggtgggaggatcgcttgtgcccaggagttgaaggctgcaatcagctatgactgcaccacagcactccagtctgggcaacaaagtgagaccctgtctcaaaaaacaacaccgtaggcccagcacggtggctcctgcctgtaatcccagcactttgggaggccaaggcaggtggatcacttgaggtccagagttcaggaccagcatgaccaacatggtgaaaccccgtctctactaaaaatatacaaattagccaggtgtggtggcagacacctgtaatcccagctacttgggagactgagggaggataattgcttgaacccgggaggcggaggttgcggtgagccaagatcgcgccattgcactccagcctggttgacagagcaagaccctgtctcaaaaagaaaggaaaagaaaaagaatacaccagaaggtacccagagaggccagtgtggatgtacagccagcacataagatgctggttagggacaggcgcagtggctcacgcctgtaatcccagcactctgggaggcccaggcagggggatcacctgaggtcaggagttcaagaccagcctggccaacatggcgaaaccccgtctgtactagcaaatacaaaaattacttgggcgcggtggcacgtgctataatcccagctactccggaggctgagggtggaaaattgcttgaacccgggaggctgaggttgcagtgagccgagatcgcaccactgtactccagcctgggcaacaagagcgaaactccgtctcaaaaaattaaataaataggccgggcgcggtggctcacgcctgtaatcccagcactctgggaggccgaggagggcggatcacggggtcaggagatcaagaccatcctggccaacatggtgaaaccccgcctctactaaaaatacaaaaacttcgccctgtatggcggcacacggctgtattcccagctactcgggaggctgaggcaggagaacggcttgaacccgggaggcagaggctacagtgagccgggatcacaccgctgcactccggcctgggcagcaagagcaaaactctgtctcaaaaaacaaaaaacagaaaaacaaaaagaatcaagtaagtcgaagccacactgataacagccaatttttgtgaaccaagggagtgtcaattcaagaatttacatagatgtctacttttgctatctcctatgtgccaagcaagatacaggctctgggcaatcagaaacaaaagagactcactcgttcctctcacagtactcagtccttactgagataaggacaaaagaaaatgtcctgtctggaatgcagggaaaccagaacttcaggtcaggggacatttccattgaattgtgtggagttgaagctgaaaatacttttttttttttttttttttttacatcacggcatggtttattacgtgatttttttactatacaaacaaaaaatacagaaatgcaatatgtgaatacagctaaatgcagaatggtgacttttttctcttcaagaggccatgattcccatttctagtaaaataaagagaccgcatacaggttggttgtgagattcacaattttgcctagaaatgatctataaatgcatttttcccccctgctacctaccgtaaatcgtaaaaagggagttaaagcaaagtttccttgttggttcctaccatatggaagatgctatattctattttagcagggtcaatatttggaaaatatctaaattaaatattattacaaaaatgaagctgtaatgagattctggctaaagagggcactaaatgagaataatatatatttaaagaatccaaaacaaacaaacaaaaagaggttattataaaaagctctaggtgcactgtaagcatatagggtttttttttcatgtgtttttttttaaacaatggaagtgtcaaaaatagggtcaactgtgttagactaaattacattattgtatatgctgcattgaatggaacctttgtattataattatcatagagaagcacagtttgcatcatattatggcaattcatcgtcaatgaaaaccttccagagtccttttattttggaatctcctgtaaactatcaaaccaccagaacatgactgtacaacagtaaaatgttctcttgcattaaactgaagagacctgtttaataaaaaaagaaaaagaaaatgtaggaaaggtacttagagctgttactttctaagtacacaacaccctagacaattcgaggcatcttaatctccatcaagaacaacaacaacaaaaataatttttgtcatgttgttaaatccatcattatggatcaaactggtgcaacttggtcaaatgaatccaacaaacactgatgtccaagctggcatattggcaactaatacacaactggtggtcaatagagagtttaaaagatcttccctttcttgttgttcttttccaaggttctcaaagagttctgttgctctaaaatacgttgttgagcttcccagtttgctttctcatcctcaaactgacgacgtttctcctctaattctttgtgccgtgctcccaaattctttttcagttgcacatggcactgctggagctaaatcacagcacaatatataccccaaggatactgccttcctctgaccctttttccattaacttcagtgataatatcactacccaccacagcaagaggtaaacggtcctttatctttttaacacgtttcttttcttcttcatcatctgtttctggaaattcatatattttaattttatgttcttggatttctttcattatctgttttgtaaactgttgacattcctctggtgtgagtgtgtctgctttggcagtaagtgggatgatattcactttttcatgcaaatgtttcataaactcaacatccagtggtttaagtctcaacaaaaggcaatgtcaagtagttacaaacatgcactacccaatcctgcctgaaggtgggagtcttcagttatgtaatggtcctgttatcaggcatctgacgtctgctcactcgcgattctgcatttaggtagtcctcaaatttactatcaatgtaatcgataacaggctgccagcaattactactatccactgcatctccaaatcctgaggtatcaactatcctgagcagcaactaaacaccaccttctttgattaaaactttggattgttccatccaggcttctattttcccatagaggtccaaaaaacgcccttgtttgttaagttgatatatgtaaaccttttctccaggctgttccttgaggtttacataattgggaactccttcaagcatctgtaaataaaccttttcagctgtagatctctctattttcagttaatttgcagaccaccaactataggagccaagttgaaagagaaaaaagtttctcttcccagcactttctttaggatgcttttcattgcttcccaactggaggcctcgcccctccacccacctgccctagtcctcagctgcctccagttctgtccacttaaatacagactcccggtagtagagaacttttttaaaattttattattattattattattattattgacacagtcttactctgtcgtccaggctggagagcagtggcacaatctcagctcactgcagcctctgcctcctgggttccagcgattctcctgcctcagcctcctgagtagctgggattacagacacccgccaccatgcccggctaatttttgtatttttggtagagacgggggtttcaccatgttggccaggctggtcttgaactcctaacctcaggtgatcctcctacctcggcctcccaaagtgctgggattacaggcgacagccaatgtgtgcacggcccaggtattaaggaattcaatctctatttctcaccaatgaattaggctctggaagttagtagattttaacaaatacttgttaagctaagttcttctcaaaggtctttaggaatattcagtaaaagaggactctgttaactgaaaaccagttctgttccagtaaatcctcaacagatggagaaaatgagactatgccccaccctttccccttagggcctccacattgattagaggaggaattctccttttaatgactgactgagctatcactcctctctgtcagtaaaaacagcagcaaaaaaaatgtcttggctgggcgcagtggcacatgcctgtaatcccagctctttgggaggccgaggtgggcagatcacctgaggtcaggagtttgagaccagcctggccaaaaccccgtctctactaaagatacaaaaattagccgggcatggtggcaagtgcctattgttgtacctgagcgagttagaaaaacgccacactttgagacgaattaagagtcctttattagctagcgcctgagagacgtctaaggcttaaaattctctcagcccggaggaaggggcttgattaacttttataccttggtttaggaaggggggggcgtccagttaaaacaattttacagaagttaagtaatcaaaaagttaaaaggataaatggttacaggaaagtaaaacagttccaggtgcaggggctttaagactattacaaggtgatagacgcggggctttgggcgttatcagtcagacgaattcttggggactgcggatatagcttgccacagtatcttatcagttaattgcattcttggatgtgctggaagtcagcttgcacaagttaagtccttgaggaagggactgccagtgaaagagccaagatggaatctgtctggctttcttagcttagggagagtcagttcaggtggaaacaaggctaggtgattaaaggaaaagggagagtctaaaaacagggttagtaaaaaccaggttgggtattacactataatcccggctgcttgggaggctgaggcgggagaatcgcttgaacctggaagatggtggttgcagtgagccgaggtcgtgccactgcactccagcctgggtgacagagcgagactctgtctcaaaaaaaaaacaaatttcttggccaggtgctgtggctcatgcctataatcctagcactttgggaggcccaggccggcagatcgcttgaggtcaggagttcgaaaccactgtggccaacatggtgaaaccctgtctctactaaaaatacgaaaaagttagctaggcgtggtggcagacgcctgtaatcccaggtcctcgggaggctgaggcaggagaatcgcttggacccggcaggtggaggatgcagtgagcagagatcgcactacttactgccctccagcctgggcgacagagtgagactctaacaacaacaaaaaaaaaaagaaaaagaaaaagtaaaagaaaattctgacatcaagctcattgaaatgtattcttccctttcctcagctgctgccaaggtgctcggtccttccgaggaagccaaggccgcgttgcagtgaggccctcacttcatcccgcgactagcaccacgtccggcagtgccagccccacactcgcccgcgccatggcctctgtctccgagctcgcctgcatctactaggcgctcattctgcacgacgatgaggtgaccgtcacggaggataagatcaatgctctcattaaagcagctggtgtaaatattgaacctttttgacctggcttgtttgcaaaggcctggtcaatgtcaacatcgggagcctcatctgcagtgtagaggctggtggagctgctccagctgaggagaagaaagtggaagcaaagaaagaagaatccgaggacggtgatgatgacatgcgctttggtctttttcactgaacctctttttataaagtgttcaataaaaagctgaacttcaatttaaaaaaaaaagaaataaatgtattctttgcatctggcatagtgtgcccagcgcgtgtgatcccagctatgcaggaggatcatttgagtccaggagttccagtccagcctgggttaacaggtagaaccccttctctggaaagaaaaaaatgtaaaaaggcattctttgtgtattatttttttgaaacagggtctccctctataccccagactggagtgccttggtatcatcacagcttactacagccttgacctcctgggcccaagcagtcctcccacctcagtccccggagtagctgggaccacaagtatgcaccaccatgcccggctaattttttatttattattctctttctcttttctttttttttttttttttttgagatggagttttgctcttgttgcccaggctggagtgtaatggcgtgatctttgctcactgcaacctccgcttgctgggttcaggtgattctcctgcctcagcctcccgagtagctgggattacaggcacctgccaccgtgcccagctaatttttgtatttttagtagagacggggttccaccatgttggccaggctggtcttgaactcctgaccacaggtgatccacccgcctcagcctcccaaagtgctaggattataggagtgagacaccatccccagcctaaataattcttttttttttttgagacagagtcttgctctgtcgcccaggctggagtgcagtggccctatcttggctcactgcaacctctgcctcctgggttcaagcgattctcctgcctcagcctcccaggtagctgggattacaggcgtctgccaccgtgcccggctaatttttatatttttagtagagacagggtttcaccatcttggccaggctggtctcgaactcctgacctagtgattcacctgcctcggcctcccaaggtgctgggattgcagtgtgagccaccacgcctggccatatatttttatatatatgtatatatgtgtgtgtgtctgtgtgtgtgtatatatatatatatatatatatatatatatattttttttttttttttttttttttttttttctaaagatgaggtctccccatattgcccatgctggtctcaaactcctggcctcaagccatcctcccaccacggcctccaaaagtgctgggattacagatgtgatccgctgcatagggccaaaaaaccccaccttcttttgggggttaataggcacctgaagccaataataataaaataataaaaataaaaaagaaaccaataataataggtcgggcacggttgctcatgcctgtaatcccagcactctgggaggctgaggcagggggatcacctgagatcgggagttcgagaccagcctgaccaacatggagaaacctcatctctactaaaaatacaaaaaagttagctgggtgtgatggcgcatgcctgtaatcccagctactcgggaggctgaggcaggagaatcgcttgaacctgggaggtggaggttgcggtgagccgagatcgcgccactgcactccagcctgggcgacaggagtgaaactccatctcaataaataaataaataaataaataaataaataaatgggcacctgaaatctctttttccgaagttgcgaattatccaattcatgccttagaatttagtcacatttccaggcctgtcccctgacttccgtttccatttcctcagtgatgtcccccaacctctctgcagatccaagcctcttcattgaggccattttacacatcagcaccatccaacagaactttttttttttttttttttgagacggagtcttgctctgttgccaggctggagtgctgtggcgcaatctcggctcactgcaacctctgactccctggttcaagcgattctcctgcctcagtctcctaagtagctgggattacaggcacatgccaccatgcccagctaatttttgtatttttagtagagacggggtttcgctatgttggccaggatggtctcaaactcctgaccttatgatccgcctgccttggcctcccaaagtgctgggattacaggtgtgagacatcgtgcccggcccatccaacagaactttatatgcaaggatgcacctgttctgtacctgcactattcaatatagtcctgatgtgggccaggtgcggtggctcatgcctgtaatcccagcactttgggaggctgagctgggcaggtcacttgagcccaggagtttgagaccagcctgggcaatatggtgaaaccccgtctctacaaaaaatactaaaattatctggacatgatggtgggtgtgtgtagtcccagctattcaggaggctggaggtgggagaatctcttgagcccaggaggtcaaagctactgtgagccgtgatagtgccactgcattccagccagggtgacagagtgagaccctgttttacaatatatatatatttatattttatatattattatatgtaatataaaaatatatatttatttatcctaacctccgaaagtgctgggattaccgtcatgagcccccaagtccagcctaattttatttttattttacatttatttatttatttacttatttatttattttttgagacagagtgtcgctcaggctagagtgtagtggcacaatctcggctcactggaacctccatctcccaggttcaagcaattctcctgcctcagcctcctgagtagctgagattacaggcacacaccaccgcgcccggctaatttttgtatttctactagagatggggttctaccatgttgtccaggctggtctccaactcctgacctcaagtgatcctccccctcagcctcccaaagtgccaggattacaggcatgaaccactgcacctgtcatatttatttattttcttagaaagagtctcactctgtcacccaggctaaactgcagtggcttgatctcagctcactgcaacctccgcctccctgggtcaagcgattctcatcctcagcctccccagtagctgggattacaggctcctgccaccatgtctggctaatttttgtatctttagtagggcggtttcaccatgttggtcaggctggtctcgaactcctgacctcaagtgatctgcctgccttggcctccgaaagtcctgggattacagctgtgagccactgggcctcaccttttttttatttttctttttcagacagagtctcactcggtcgcccaggctggagtgcagtggcctgatcttggcttactgtaacctctgcctcctgggttcaagcgattctcctgcctcagcctcccaagtagctgggattacaggctcctgccactacgtccaggtaatttttttttgtatttttagtagaaacggggtttcaccatattggccaggctggtctcaaactcctgtcctcaaatgatctgcccgctttggcctccaaatgtgctgggattacaggtgtgagccactgtgcccagccctgtccacattttctagcaagcactctatcagccataactcttgagcatggaacccaaatataaattgtatggctctgagtgtctggcaaggcaggctctagaagaaggcagctggaagatggtgttcttgaccactgcagggttcggccactttagagataattgatagttccagtgaggacttattcaatagaaatataaaaagcaggccaagtgcagtggctcaagtctataatcccagcactttgggaggctgaggcgggaggatcgcttgagctcaggagttcaaaacttgcctgggctatgtagcgagaccctttctctacaaaaaataagaaaattaggcatggtggagtgcacctgaggtcccagttgctcagggggctgaggtgggagaatcacttgagcccaggagattgaggctgcagagagctgtgacagagtcactgtactctagcccgggcaacagagcaagactcaaaatgaagaaacagattttggctgtgcgtggaggctcatgcctgtaatcccagcactttgggaggccaaagtgggtggatcatgggtggtcaggagttcaagaccagtctggctaacatggcaaaatcccatctctactaaaaatacaaaaggtagctggacatggtgctgggtgccttaatcccagctacttgggaggctgagccaggagaatctcttgaacctgggaggcggagtttgcagtgaacccagatagcaccactggactccagcctgagcgacagagagtgagactccacctcaaaaaaaaaaaaaaaaaaaagctggccccgagcacggtggctcactcctgtaatcccagcactttgggaggccgaggtgggcagattgcctgaggtcaagggttcgagaccagcctgaccaacatggagaaacccccctactaaaaatacaaaaattagctgggtgtggtggcgtgtgcctgtaatcccaactactcgggaggctgaggcaggagaatcgcttgaacccgggaggcggaggttgcagagagccgagatcccgccattgcactccagccggcaacagagagaaactccgtctcaacaaaaaaaaaaaaaaaaaagaaaagaaacaaatttggagcatataccttgacagactcccccccttgaccaaactttacacaggctgtcctgagccctcctgactaggcctgggccttggctgctatcttatctttgaccttaccagcccactcttagcagagattcctgctgagttatctcttgactcttcccatctaactgcccctgatatctgatgaagtgcctcatccaccacctttgatgtaggaggccttggcccacctttagcaagaatcccgttaggccagttgaagcagaaatcctctgtccagggtgcctcctttgtaattttccatccatgaacccatctctctgttctttggctaaatcccatttttgcttcttcttttttttttttttgagacggagtctcgctctgtagcccaggctggagtgcagtggcgcgatctcggctcactgtaacctccgcctctccaggtttaagcaattctctgcctcagcctccagagcagctgggattacaggcgcgtgccaccatgccccgggaatttttttgtatttttagtagagacggggtttctccatcttggccaggctggtctcgaactcccaaccctgtgatccacccacctcggcctcacaaagtgctgggattacaggcgtgagccaccgcgtccggtcttttttttttgagacaagctggagtgcaatggcatgttctcaactcactgcaactttcgcctcccaggttcaagcgattctcctgcctcagcctctcgaatagctgggattacaggtgctcgccaccacacatggctaaattttgtatttttggtagagacggggtttcgccatgttggccatgctggtcttgaactcctgacctcaagcgatctgcccacctcagcctcctaaagtgctgggattacaggcgtgagccaccgcagcctttgtccactccttgcctcgatactgaggtcagcaaacattttctctaaagagctagatagtaaatggtttaggttttgtgggtcacgtggtctctgtcacaatttctcaactctgcaattactatagcaagaaagtggccatagggtcaggctctggctctcctgcaattcccacgctttgggaggcccatgcatgaggatcacttgagcccaggagtttgagaccagcctgggtagcatggcaaaaacccatatctactacaattgcaaaaaattagccaagtgtggtggcacaagcctgtagtcccagctactagggaggctgagacggggttgcttgagcccagaagttcaaggttacagtgagccatgatccagccactgcactccagcctgggctacagaggaaaactctggctctttatgaaataaaaatgaataaatagggtggggggctaggggagggaaaacattaggagaaatgcctaatgtaggtgacgggttgatgggtgcagcaaaccaccggggcacatgtatacctatgtaacaaaactgcacgttctgcacatgtaacccagaacttaaagtacaataaaaataaatagataatttaaaaatgaataaataaataagcagagcccagaggctcttttctttctttctttcttttttttttttttttgagacggagtttctctcctgttgcccaggctggagtgcaatggcgcgttctcagttcagtctcttccctttaatcccacatactcaggaggctgagatgggagggatacttgagaccaggagtttgagaacagcctgggcaacatggccaagaccctatctccagtttaaaaaaaaatgccaccacgcctggctagtatgtatatatagtatttattttgtagagacagggtttcagcatattgcccaggttggcctcaaactcctgagctcaggcaatctgccacccttcacctcccaaaatgctgggattatgggcttgggccaccacgcctggtctaatctttcttatacaatgtcccccccacacccccgaatcgaggatggacgccagcaccttttaggtgttccacatattaaaccatgtgtattaaatcttggagtgttaagaacacaggcaaacaaaataagcagccattaaccggggaaaggtttaatctagtctggcaagaatctttccttcctgaactcatcccattgcagaaaagatggataaaatggtaaattctccttaatgtcataaggaggtttatcatgcacccacccaaagtctgtagataaacagtgactgagagaaaaatgggattacaggaacgaatattgtacataaaaggatttctcaaactgttaggctgtttacaaaaaaaaaaatgctaatctcattgttatggggagctggggcagattatgcaaagggctgggtttcagggtgaggattcagggtgattatcatgacaaggaggtctattggtttgcaaacgatgacctttcagctcagcaggaagaacttctgattaggcaaaatttcctctatctgtccgctcctcccaagaagcacgggctatgaaatctcatgtcctaaatatttgggatttctgattccttctgttattttatgtatttatttattttttgagacggagtctcactcttgttggccaggctggagtgcagtggcatcatctgggctcactgcaacctccgtctcctcggttcaagcgattctcctgcctcagcctcccaagtagctgggattacaggcatgcgccaccacacctggctaattttgtattttagtagagatggggtttcgccatgttggccaggatggtttggaatccctgacctcaggtgatccacccacctcagcctcccaaagtgctgggattacaggctcgagccaccgcgcctggctgtcattttttttttttcaaagagctcatttaagagtaaagataaattgacacttaaagttcactaatagttaatacaattattacaatttgaggctttacgttaaatatgtgtgttgaattaccgcaataatacaagaccagatcaactatacttgtcaggtcagaatgaaaatctaagaagcgcatcttgaattttaaatttttttcaatttgatttttcttgtcaagcctggttgtggggggggaaggtcaagtcttaaactggtctcaccaccaatgttatcaattgtcaaaaaaaaagtcaaattgggccaggcgtggtggcttatgcctgtaatcccagcactttgggaggccaaggtgagaggttcgcttgagcccaggagtttgagaccagcctaggcaacaaagcaagaccagcatctccctctctctctctctcttctctctctctctctctctctcatatatatatatatatatatgtattttttttctttctttctttttctttttttgagacggagtcttgccctgtcacacaggctaaagtgaatggtgtgatctcggctcactgcaacctctgcctcccaggttcaagcatttctccctgcctcagcctcccgagtagctgggattacaggcgcccaccaccacaccgggctaatttttgtattttttagtagagacggggttttcttatgttgaccaggctggtcttgaactcctgacctcaactgatccgcctgcatcagcctcccaaagtgctgggattacaggaatgagccactatgcccagcccatctctatatttttaaacaaattatacaacaaaaaagtaaaatatcacattggatattttttctttattctttgtttttttttttttttgagacagagttttgctcttgttgcccaggctagagtgcaatggcgcgatctcggctcaccacaacctccgcctcccgggttcaagcgattctcctgcctcaacctcctgagtagcatgcaccaccaccccggctaattttgtatttttagtagagacggagtttctccatgttggccaggctggtcttgaactcccgacctcaggtgatccgcccacctcggcctcccaaagtgctgagattacaggtgtgagccaccgtgcccagcggatcttttttcttttcttttttctttctttccagggatggggtcttgctctgtcacctgggctggagttcagtggcaggatcaggcctcactgcagccttgaactcatgggctgaagagatcctcccacctcagctttccaaattgctgagattacaggcttgagccactgcctgcagtcctctttcaaatgcacttaaaaatcgtctttgactatactctttgttgaatgttgattaaattcaattgcactaataacattttttatattcaaaaatacaaacgttggccgggtgcggtggctcacgcctgtattcccagcactttgggaggccgaggcgggcagatcacctgagtttgagagtttgagaacagcctgaccaacatggagaaaccccgtctctactaaaaatacaaaattagccggcgtggtggcacatgcctgtaatttcagctattcgggaggctgaggcaggagaatcacttgaacctgggaggcgaaggttgtggtgagccgagatcgagccactgcactccagcccgggtggctgagggagactccgtctcaaaaaaaaaaaaaaaaagtcagcaatgaactcgctgtgctggcccaagggcaggagaagaaagccgcccttaaaggagaaatttgcaaagacaaaatgaggtgatgagaaaaagccgagttctaggaaatacccgagagatcatccaggtggttcacaaatagcagaaaatccaggtgcagtgtgagaggagtgagtaggttagataggaatctggatggctgagctgtaaggacataagcactgacctcccgcaaccttgacaaagatcaaagcaagaatttttttttttttgagatggagtctggctctatcacccaggctggagtgcagtggcgtgatgtgagctcactgcaacctctgcctcctgggttctagcgattctcgccaaacatgctatttgctgtctcatttctatctctcgccatcctttgcagcaaatgctgtacattttcattgatgaaggaactaggtttaaccagaaaggttgagcacgtactcccgcagctggctaggattacaaatgggaaggaaaccctggcctcctggggccccaagtcttccccttccttgagtcattcattattttgagcacttaccattttcaagcccctcctcacctctccaacacccacctttttgagttcctctctatgcctcaaggtcaaaggaactctagtggtttcattaaataaaatcagaaatgtttccgcttttttatcaaagttgctctcaaaaatgttcactgccgcactgtttttttcttttctccctctctttttttttttgagactaagtctcactctgtcgcccagaatggagtgcagtggtgtgatctcggctcaccgcaacctccacctccagggttcaaaggattctcccacctcagccccctgagtagcagggattataggtgtgagccacaccgcacccagcttttttatttttttaaaatttattattattatttttgagatggagtctcactctgtcacccaggctggagtgcagtggggcgatcttggctcactgcaacctctgcctcctgggttcaagcaattcccctgcctcagcctcccgaggagctgggactacaggtatccaccaccacgccgagctaatttttgtatttttagtagagaccatgttggctaggatggtctcgatcgcttgacctcgtgatctgcctgcctcggcctcctgaagttctggcattataggcatgagccactgtgcccagcctatttatttattttttgagacacggtctcactctgtccccaggctggaatgcagtggcacaatcttggctcactgcaacctctgcctcccgggttcaagcaattctcttgcctcagcctcccaagcagctgagattacaggtgcacaccaccatgcgtgggtaatttttgtatttttttggtagagacggggtttcgccatgttgcccaggctagtctcgaactcccggcctcaagtgatcgtccgcctcggcctcccaaagtgctgggattacaggtgtgagccactgcgctctgccaaaatactatatttaaatatttgttgagtggatgactggtggaatgattttcttctggttatttctctgtgttttccaatgtatttataacgaatacatgttggcgttactagtaatagggatcacctaatttctatttgaatcagtgtttgaaaaagtttatgaaggtgtgtctgactaaggcaagctaggatcaaagggagcagggtggcttggggcggagaccagggggaatgagagggtgggaaggggtgggctttaatcctatcaaagttgagtgggctctcaccctatataagaacgcagctgcagtgaaccttgttctttctggcagacctgaggtgtggacgtatcattggcctctgtgagtattgctatgttattttattttctttcattttactttattttttagggtcaggatctcactgtcgcccaggatgaagtgcacaggtaggatgatggcgccttgcagcctcgacctcctgggactcacccttttagcctccagtagctgggaccacaggcgcgcaccaccattcccatgtgcgtttttctgcttttttttttttttttttaggagagatggggttttctatgttatccaagctggtctcgaactcctgggctcaagagcaatcctaccaccgtagccttccgagtagctgggactacaggcttgagccactccgcccagccgggctgtacttttgttctatttctgtgattttttttcagtcttaaggacgaaggccccactgtccctcacacgtgttccttcctacttgcattgtactcagtcctcatggcttgcatctggaggctatgggcgggggagtgctttgaatatctatacgtggaaagccttgttttttactttttaagaaagggtcgttaaattcgtgctttgtagaccttcaacagctcatcaagggctactctccacctccttgcttaaaagcctcttctgatgggtaagtgcttccacttgcgatcgccgccttgccgcatcccctcagcctgtggcactcaaactgtgggggcactttctgctctctggtgaaagtgccgccatcttttgagtgttaccgcttgagaagactcaacctgcggagaagataccattttgattgggtgagggggcgggtagcaggatggccctagaccctgcctatggccgtttcctcgtgatataaatttcttggccggggctcttgcagatggagctgctcaccctgtgggcctcaaatgtggagcactattctgatgtccaagtggaaagtgctgcgacatttgagcgtcaccggtgacgcccatatcaacggatgccgtggagctcggtcttctgcaggaactaaagagcctgtggtttcgattcccagccggaaactgtcttgggtacaggtcccttacagcgtctggctgtaatggctccggaaaacctggggaagggaagggggcctcctgggctctcacctgacacaactaagggaatctgggttagatggtgaaaggaagagaaggttcagagggcggctgtgcgcctgcgccgggcgcggcggctcacacctgtaatcccagcacgttgggaggccgaggcaggcggatcacgaggtcaggagatcgagaccatcctggctaacacggtgaaaccccgtctctactaaaaatacaaaaaatgagccgggcgtggtggcgggcgcctgtagtcccagctacttgggaggctgaggcaggagaatggcgtgaacccgggaggcggagtttgcagtgagccgagatcgcgccaccgcactccagcctgggcgacagagcaagactcattctcaaagaaaaaaaaaaaaaaaaacagcagctgtgaccaaggggctgtatgcacaaagaaaggaatgctttttgctgttggtgttataattgatatgtaactttcctcttcccccatagcaagcaagtttattgctgacatttaacatgtgcttggatgattggaggccaacctcttgtaggcaagaaagtcacagtgatggcagatcctcgcgaggagctcatactgggatactcaaaatgggggcgctttcctttttgtctgtactgggaagtgcttcgattttggggtgtccctgtttgagtagggcatcacgaaccatcctgcttcaagggagcctgcgggtctgactgcagcttcagctatgacctggagttcccgggcttctctgcggggcaccagtctgtatgctccattttagataataaaaattggcatattctggggtgggcaggatacggggttcacctgcagatgaacagggcaggaaaagcttgatggggtgtcgggggaatctggttggccttaaagggaatttggggtcctgttcctgaatttggtaggcagcatgcatgtaaggcttgaagtgggtttggccagagcatgggctggagtgcttccaccctgctacacggacaatgccacagtctcacttttcctaacttttttttttaataaaatgtgaacaacatcatgtgtttctggtctattgggttcctctgccacccacaagtgctgggattacaggcatgagcctcatgtctggcgttactgaaccttcttctatgacccaagtacattgcctaaaaatacttgtcagtattttgtgcttcccttctacccctgctagaacttagagttatgctctttgagagttctgctctttaaacttcaaacaagtttaaaaagtaaggccgggcacagtggcagcactgccgaggccgacgcaggctgatcatgaggtcagatcaagaccatcctggctcacacggtgaaaccacatctctactaaaaaatacaaaaacattagccgggcatggcggtgggtgcctgtagtcacaggctgaggcagaaagggcatgaacccgggaggtggagcttgcagccagccgaggttgtgccactgcactccagcctgggtgacagcgataactgtctcaaaaaataaaaaccacccaggctgaagtgtggtggcaccatcacagctccctgcaggcctgagctccctagatcaaaagatcttcccatataagccccccctcaccccacccttagtagctggcaccacaggagtgtccccgccatgctccactaatgtttagtagaaattggggtctcatacattggccagcttggtctgaaacttagggggaatcaaacatccctcctttagtagagatggggctttactgtcttgccctgggtggcctccctgggatgatgggtgtgagccacagtgccaggcctaagttcatatttggaaggtttttttgcttcagatggtctcgtgctctcgctcaggttggagcgcaatggcgcaatcttggttcactgcaacctctgccagcttaagcgattctcctgcccccgcctcccaagtagctgggattacaggcataagccaccacgcctggctaattttttgcattttttagagatgggatttctccacgttggccaggctgctctggaactcctgaccccaggtgatccacccacctcggcctcccaaagtgctgggattataggcgtgagccaccacgtggggccttcagtaggttcttagttgctgtttgccctatcactggtttccgggtctgctggccactatcccctgtaagttttcctatcccctgtaggtgttccaaacccttgcggctgctttgcccactccacagtatctgaactgaagtaagatctcaaattcaagggagttttgttttgctatttgtacccgcaattcataaagcagttgtagcctctgtcccaataccgccaccactggtggggagtccgccacggtaaccagtaagacttctctttatatttgacctacctgggcctcctgtcatcttttctacgggcagcttggggattgttagttgagggttttttgtttttgtgtttttttttttgtttttttttttttttaaagagatggagtctcgctctgtcgccagactggagtacaatggcatgatcttggctcactgcaacttccacctcccaggttcaagcgattcttttgcctcagcctcccgagtagctggtattataggcacccaccaccatgcccagctaattttttttggatttttagtacagatggcgtttccccatgttggccgggctggtctcactaaactcctgacctcaagtgatccacccaccttggcctcccaaaattctgagattacaggtttgagccactgcgcccagcctttagttgagtttcttaagcttgtttagggtttagcctgtatggccagcagggtgtaggtgggggtggtttgtaagcagggctgtttgcttcagaagcagctgtggaaacaggactgaatgcagacatataaagaatattgggtaaataactttttaaaaaatttagagataggatcccactatgttgcccaatctggtcttgaaacctaaacaatctcttatcccaaagtgctgggattgcagaaagcttaaggcacagttttacgtggtaatggtgggccatttttagtttcttttttgtagacgatcatgtcatctaggctggaatgtagcggttctgtcgagctaggtgtagcctccacttcctggactcaagcatttttcctcagcttcagtagctgggtctatgcatgaataccccttctggggtagatagatagtagtacatagagtagataatttttttgtgttcaggcggcaccttaaggttggtgtaaaaattcttggccttctaaagagctggaattagacatgagctgttgcacctggccaatgggacaattatgtctacaggactgaatcagtatctgatctctggagttgtaaggtcactttttctgaaactgcctcagtctccttgcaggttctggtctgtagatctccagtgtgtgggctgagcacagcatggggacctgatttcccaccgggcagtgacatagtttaaagattcttagttcgaattcctaataatgggaatataggtttctgtgtattgaaatgggaatatgcattttttttttttttagagtcttgctctgtcactaggctggagtgcagtggcacaatctcggctcactgcaacctccgcctcctgggttcaagtggttcccctgcctcagcctcctgagtagctgggactacaggcgccctccaccacgccctgctaattttttgtattttagtagagacggggtttcaccatgttggccaggatggtcttgatctcctcaccttgtgatccacccgccttggcctcccaaagtgctgggattacaagcgtgagcctctgcacccagccaagggaatatggattcctcttttttttttttttttttttttttttgagacggcgtctctatcacccaggctggagtgcaatggcgtgatctctgctcactgcaacctctgtctcccgggttcaagtgattctcctgcctcagcctcccgagtagctgggattacccgcatgtgctatcacgcctggttaattctatatttttattagagacagggtttctccatgttggtcaggctggtcttgaactcccgacctcaggtgatctgccctccttggcctcccaaagtgctgggattacaggtgtgagccaccacaccctttttttttttttttttttaagatggagtctcgctctgtcgcccaggctggagtgcagtagtgcgatctcggttcactgcaacctctgcctcccaggtgcaagcgattctcccgcctcagcctccccagcagctgggactataggtgcatgccaccacacccagctaattttttgtatttttagtagagatggggtttcactgtgttagccaggatggtattgatctcttgacctagtgatccgcccgcttcggcctccaaagtgctgggattacaggcatgagccaccgtgcccagcctaatttttgtatttttagtaggtttcaccatgttggccaggctggtctcgaactcctaacctcagctgatctgcctgccttggcctccgaaagtatttggattacaggcatgagtcaccgcatctggcggtatttttgttgaaagcacagtgtataataggttatggccagcctacacgtggccttgtaggtgtcagttcttggcagggcccagtgaattccaggcagggggccatcctgacatgcctgccacgttaagatttcagacattatcccctccagcaagggaggatcagggctgttggcataacaagcattctgagggttagcttgcataccagtctcttcccaaatgctgagttgccccatgtatcctgtgacatttgagaataggctttcctcaacttggcacaatttgcctttggaccaagtgctttgtcctgtgcattccttgctggatgttggcatgcattcctagtgtcgtccactagatggcagtggcacccaccccagagctcaaatattactatgttccgatgcagccagggcttggcagggctgggtggcctctgagggcccctactggccatttttcaccgtctccctctgttgcccaggctggggcgcagtgatgcaatgacagctcactgcagcctcgacctcctgggctcaagcgatcttcccacctcagtccccagagtagctgggactacaggcatgtgctgctactcctgggtaattaattgtactaattaatagtagttggctaattagtaacagtggagtcttgctatgttgcttaggctggtctctaactcctagacttaagcaacccatcttgcctccacctttgaaagtacgggggttacaggcgtgagacaccgcacctggcccctgttgggatttacccctcctgttaggggccatcaaacctctcttagttggtcatcccttaaagctccgtcaaactttttttttttttttttttgagatggagtcccactctgtcgcccaggctggagtgcagtggcgcgatctcggctcactgcaacctccacctcccgggttcaagcgattctcctgcctcagcctcctgagtagctgggactacaggtgcccgccaccatgcctggctaatttttttttatttttagtagagacagggtttcaccatcttggccaggctaatctcaaactcctgacctcgtgatccacctgcctcggcctctcgaagtgctaggattacatacatgagccaccacgcctggccagctctgtcaaacattaatttgatcccaagcagagggacttttgatctcaatctgcatgagtctgtctctaggaaggaggctgatcattatgctgggggggtgatgagcaccctcccatcttcctctgtccagatctcaggggagagccagcagataggaccattcagcagccaatgtccaaataaggttttgttactcgaagcgctgccaacctactgtgggtcattttattcaggtccatcccaaataacctgtggacacaagagttgatattattccagtgtactactgtggcattcaattaataagccttaagtatctattgtgcactaccgtggtaagataattccatgatcctccagaaattccacccaacgctgctggaaagtaggcttactacatgctacatgcaagtccccaagctgtgttaactgcataatttttttttttttgagacacagtctcattctgtcacccaggctggagtgcagtggtgcaatctcagctcactgcaacctccacctcccaggttcaagcgattctcctgcctcagcctccccagtagctgggactacaggcgcccaccaccacgcccggctaattttttgtatttttagtagagacaaggtttcacccgtgttagccaggatggtcctagtctcctaacctcgtgatccgcccacctcggcctcccaaagtgctgggattacaggtgtgagccaccacacctggccaattcataatttatcatagccttatgaagatgcaactatgttctccattttttttttctttccccaagatggagtcttgctctgttgcccaggctagagtgcagtggcatgatctcagctcactgcaacctccgcctcctggcttcaagcgattctcctgccttagcctcccaagtagctgggattacagtcacgtgccaccatgcctggctaatttttgcatagagccacccgctcccagccgtaagtttttgtatttttagtagagatgtggttttgctatgttggccaggctggtcttgaactcctggcctcaagtgatttgcctgccttggccttttttttcttgagacaagttcctgctgggtcacccagtggcgtaatcatggttcactgcagccttgaactcctgagctcaaaggatcctcccacctcagccccctgagtagctttgattagaggtgtgtgccaccatacctggtgtgtgcgtgtgtgtgtgtgtgtgtgtgtgtgtgtgtaaagaaagcaattttcctaactcagcctgtcaaagtactgggattacaggcgccatcccctgcacccagcctaaactttgattgcatcactgcactccagcctgggccacagcaagatcctgtccaaaaaaaaagcaattggagtttgaacccaggcagagtaattctagattctcactcgaatcacagtgacctccaatgcaattggtgagccacgatggtccccttcaacagacaaggaaattttttttttttgagatggagtctcactctgtcacccaggctggagtgcagtggtgtgatcttgggtcactgcaagctccacctcccgggttcacgccattctcctgcctcagcctcctgagtagctgggactacaggcgcccgccaccacgcccggctaattttttgtgtttttattagagacggggtttcgccattttagccaggatggtctcgatctcctgacctcgtgatccacccgcctcggcctcccaaagtgctgggattataggtgtgagccaccgcgcccggcctcagacaaggaaattatccaaggtcacacagccagtagatgacatagctaatatgtggcctcatctgtatgccccctaattgcatacaccagtgcataacgtatttgtccatccagcttatctaccctcatgctcccagcccaatgtccagcctcctccagaaagaactggtcatcatccctcaccagaggactcggagtttgcagccaggatggctcagccgcttgcaaagcagtcggacacctgtgtcccctagggcgttgttggtcaggtaaaggtcggtcaaggtctggttgatccccagggtgaagtaaagattctcacaagccttggctgtgaggccacagctatccagcctggtgaagataaggagttggttaaggtaacaccaggggctacttatgttattcggaggcagtgtctcaccctgtctcccaggctggagtacagtggtgagatttctgttcactgcaacctccgcctcccaggttcaagcgattctcctgcctcagcctcctgagtagctgggattacaggtgtgcaccaccaccaattagcatggctaatttttgtatccttttatttttgttttgtttgagatggagtctccctctgttgcccatgctggagtgctgtggcatgatctcggctcactgcaacctctgcctcccgggttcaagtgattctcctgcctcagcctccccagcagctgggactacaggcgagagccaccacacccaactaattgttgtattagtagagagagggtttcaccttgttggccagaatggtctcaatctcttgacctcgtgatccgcccgcctcagcctcccaaagtgctgggattacaggcatgagccactgtgcccggccgtaatttttatatctttagtggagaggggatttcaccatgttggccagactggtctcaaactcctgacctcaagtgatccaccaaccttggcctcccaaagtgctgggattataggcgtgagccactacgcccagcctctgaaacattttaaaaaattatctgggttaggccgggcgtggtggctcacgcctgtaattccagcactttgggaggccgaggcaggcagatcacctgaggtcgggagttcaagaccagcctgaccaacatgagaaaccccgtctctactaaaaatacaaaattagccggggtggtggcgcatgcctgtaatcccagctactcgggaggctgaggcaggaattgcttgaacccgggaggtggaggttgcagtgagccaagatcgtgccactgcactccagggtgacagggagaccctgttttaaaaaaaaaaaaaatcccaaataaactagatgatgcctcatcccattctaagtccttcagattagggctacagctggcctggcagaaaggtgagggagaaagtcacaattaacatttgattggaatttacagagcaccagattgaattattatttttttttctcgagatggagtctttctctggcacctaggctggagtgcaatggtgtgatctccgctcactgcaacctccacctcctgggttcaagtgattctcctgcctcagcctcctgtgtagctgggattacagacacccaccaccacgccaggctaatttttgtattcttaatagagatggccatgttggccaggctggtctcaaactcctgacctcatgatctgtccgccttggactcccaaagtgctgggattacaggcatgagccactgtgcccggcctgaattattatttttgagacagagtcttgctctatcacccaggctggagggcagtggcatgatctcagctcactgtaatctcgcctcccaggttcaagtcattctcctgcctcaacctcccgagtagctgggattacaggcatgcgccaccacactgggttaatttttgtatttttgtagaatggtgtttcaccgttttggccaggctggtctcgaactcctgacctcaggtgatccacccgcctcggcctcccaaagtgctgggattgcaggcattaagctaccgtgcccagcctcttttgtaatttttaaattttaattttttttttttttgagacagagtttcactcttgttgcccaggctggagtgcaatggcatgatctcggctcactgaaacctctacttcccaggtacaagcgattctcctgtctcagcctcccaagtagctcggattacaggcatgtgccaccaggcccggctattttttttgtatttagtagagacagggtttcaccgtgttaggctggtcttgaactcctgacctcaggtgatccacccacctcggcttcccaaagtgctgggattacaggcatgcgccatcgcgcctggccttaagtttttaaaattttaagtcgggtagcacccccaaatcagaataagttcagagagacttcctgtcttttctttccacctctcttcttgctacctgaatcttttgtagtgaagcaggatagttcataaatagaaaaatgaaggatgagaaggcgcttccactgtccaaacgtgaccactgccaccccgtcactccccgatgctcaccacagtttctggagtctgcaggcgggatgttgcagcccctcagccagcaaccacaggccccagtctcccaggtcgttgaaactcaagtccagctcccggaggttgtggttggcctggagcaccacagaaagaccctcacaggcggcagagcccagccggcagatgcccaacctgcaaagacaggatgctagggcggagtgggaggcattcctcctgcaaaatctgctgggagggccctgtgccaagccctgtgctggttgcagacagagggacagactcaatctctacccttgagagacaaaaagaaaaagacgacagaagtaggaagatgagaggaagggaggaataagagaacagaaggaagcaactaagaatcaggccaggtgccctggctcatgcctgtcatcccagcatcttgggaggcttgaggctggagggttttttgaggtcaggagtttgtgaccagtctggacaaccaataacttgtctgtacaaaaaaaaattttttttctttttgcgatggcgtttccctcttgttgtccaggctggagtgcaatggtgcaatctcggctcactgcaacctccacctcacaagctcaagcgattctcctgcctcagtctcccaagtagatgggattacaggcatgtggcaacatgcccggctaatttttgtatttttagtacaagcggggtttcaccatgttggtcaggctggtttcgaactcctgaccttaggtgatccacccgcctcagcctcctatctacaaattttttttttttttttttttgagacagagtcttgcaatgtcgcccaggctggagtgcagtggcgtgatcttggctcactgcaacctccgcctcctgggttcaagtgattcttctgcctcagcctcctgagtagctgtgactacaggtgcacaccaccacgcccagctaatttttgtatttttagtagagacggggtttcaccagttggccaggatggtctccatctcttgacctcgtgatccacccgcctcagcctcccaaagtgctgggtttacaggcatgagccaccgcgcccagccgcgtgtgtgattttttgttttttgttttttgctggtgccttgataaaaaaaatacacaaagtgtgttttttgagcacttctacccacgtcttatactagtcactaggagatacagttggcatagctcctatgcttgtggaatgccaccacacacacatatacacaaattacaaatttttcttttttttttttgagatggaatctcgctctgtcatccaggctggagtgcagtggcaaaatctcagctcactgcaacctccggctcccgggttcaagcaattcttctgcctcagcctcctgagtacctggatatcaggcgtccgccaccatgcctggctaatttttatatttttagtagagacggggtttcaccatgttggccaggctagtcttgaactcctgacctcaggtcattctcccaccttggcctcccaaagtgctaagattacaggtgtgagccaccgcatcctgccttcagatttcaataaatgatgctgagggggaagtatgaggtcacataggatcataaatctaggaacccagattttagctagggattagaaagggtgtccagctgggtgtagtgggtcacacctgtaatcccagcactttggaaggccaaggccagaggatctcctaaggccaggagtttgacaccagcctaggcaacaaatcgagaccttgtccctacaaaaaataaataaaaattggccaggcgcagtggctcacgcctgtaatcccagcactttgggaggccgaggcaggtggatcatgaggtcaggagagagagaccatcctggctaacacggtgaaaccccatctctactaaaaaaatgtttttaaaaattagccgggcatggtggcgggcacctttagtcccagctactcgggaggctgaggcaggagaatggtgtgaacccgggaggtggagctcgcagtaagctgagatcgcgccaccgcactccagcctgggcgacagggcaagactcgtctcaaaaaaaaagtaaaaattagccatctgtggtggcatgcgcttgcagtcccagctactcaggaggctgagttgggaggatggcttcagcccaggatgtcgggctatgatcacaccactccactccagcactggtgacagagcaagaccctgtctcaaaatacaaagtaaagagtgttcagaagaaaaattgaacttctccaggcaaagaggggacagagagcagaaggcatgccagggaataagaattgcttgtgcaaagggccgtgcgtcagaaaaccccccccttttttttttttgagacggagtttcgctcttgttgcccagactggagtgcaatggctccatctcagctcacagcaacttccacctcccgggttcaacggattctcctgcctcagcctcgcgagtagctggcattataggcatgcaccaccatgcctggctacttttgtatttttagtacagatggggtgtttctacatgttggtcaggctggtctcgaattccccacctcaggtgatcctcccacctcggcctcccaaaagtgctggaattaaggtgtcagccaccatgcccggccagaaaaatccttttaaaaaggctgatgtaggctgggtgcagtggctcaagcctgtaatcccagcactttgggaggccaaggcaggcagatcatgaggtcagtagatcgagaccatcctgctaacatgatgaaaccctgtctctactaaaaatacaaaaaattagctgggcttggtggcgggcgcctgtaatctcagctacttgggagtctcaaaaaaaaaaaaaaaaggctgatgtagtagctagagtttaggagcagagacaacctggcctccgtggtcccaggtgagagggctgcgttcatggattgggactcctagcgtggtgagcaaaacgggactcaccgcagggtctggagcttgcacgtgggatgcctgaggccctcacacagcagcagcaccccgaggtcccccagctcattcaggctcaggtccagctctctcaggctctggttcacactgagagttgaggccagctcgtcacaggcagcagcagtgaggcggcagatcttcagcctgcacaaagtccaattcaacaagcattatggaggctttcctttctttttctttttttttttttttttttttgagacagagtcccactctgttgcccaggctggaatgcagtggtgcaatctcggctcagctgcatcctccacctcccatgttcaagcgattctcctgcctcagcctcctgaatcgctgggactacaagcgtgtggcatcacgcctagttagtttttgtatttttagtagagacagggtttctcgccatgttggctagggtggtctcgaactcctgaccatgggtgatatgcctgcctcagcctcccaaaggactggaattacaggcgtgagccactgcgcctaggcccccaatcttaacagtaatgcattttcagacaatctaatttaaaaatgggcaaaagggcccggcctggtggctcacgcctgtaatcccagcactttgggaggccgaggctggcagatcacctgaggtcgggagtttgagaccagcctgaccaacatggagaaaccccctctctactaataatacaaaattagactgggcacagtggctcatgcctgtaatctcagcactttgggaggctgagatgggtggatcacctgaggttgggagatggagaccatcctggctaacatggtgaaaccccgtctctactaaatacaaaaaattagctgggcgtggtggcgcatgcctgtaatcccagctacttgggaggctgaggcaggagaatcacttgaacccaggaggcggaggttgccgtgagctgagatcacgccattgcactccagcctgggcaacaagagtggaactccatctcaaataaataaataataaataaaaataaatgagcaaaaggcttgaatacacatttcttcaaggaaggtgtacaaatggccaaaaagcacctgaaaagatgctcaatctcaataatcattggggaaatacaaatgaaaaccacgataagatagcatctcatacccattaggatgcctactattaaaaataaatagaatgcggccgggcatggtggctcacgcctgtaatcccagcactttcgggggctgaggcgggcgggtcacgaggtcaggagatcgagaccatcctggctaacacggtgaaaccccgtctctactaaaaatacaaaaaattagccaagcgtggtggcaggcgcctgtagtcccagctactagggaggtcgaggcaggagaatggtgtgaacccgggaggcggagcttgcagtgagcagagatcacaccactgcactccagcctgggcgacagagcaagactctgtctcaaaaaaaaaaaagaaaactggggaagatggtacattttatgttgcatgtattttaccacaattaaatttactttttattttattagggacagggtctcaccctgtcacccagtctggggtacagtggcttgatcacagctcactgcagccttggcctccgaggctcctgaatagctgggactccagacacataccacccaccccagctaattatgtttattttttgtagagatgaagtctcactggttcccaggctgctcttgagctcctgcactcaagccattctcctgccttggccttccagagggttgtgattacagctgtgagccaccgcgccctgcccttctgaatatttttgatccatggttgatgaaattcacgaatgcagaacccgtggacacagagggctgactgtggctcagtggcatgaagtagtttcacgctactgggaaatcatcactgctatccatctctggaactttttttttttttgagacggagtttcgtttttgttgtccaggctggagtgcaatgacacagtgttggctcaccacaacctccgcctcccaagttcaagtgattctcctgcctcagcctcccgagtagttgggattataggcatgtgccaccacgcctggctaattttgtattttagtagagacggggcttctccatgttggtcaggctggtctcgaactccagacctcaggtgatctgcccacctcggcctcccaaagtgctgggattacaggcgtgaactaccgcacccggcccatctctggaactttttcatcttccgaaatggaacctctgctcccgttaaacggtaactccccatttcttcctgttctaggccttggcagccactattctactttgttttttgagatggagtctcactctgtcaccgtggctggagtgcagtgacgtgatctcagctcactgcaacttccgcctctcaggttcaagtgatcctcctgcctcagccccctgagtagctgtgattacaggcgtgtgccaccacatccagctaatttttgtatctttagtagagagggggtttcaccgtgttggccaggctggtctcgaactcctgacctcagatgatctgccctctttggcctcccaaagtgccgggattacaggcgtgagccactgcgcccgacctgtggatgcatttttataccatcattcaatatgaagagatttgccattttattatagttgaccccaggaagaactcaccacaaagtccgtagtctgcagactgggtgcctcagtccctggcatagtaacctcaggcccaaatcctccagtgcatttcctgtcaggtccaactcaaccagatgtgggttggtgccgagcacagaagccatctcctgacaagccccggactccagctgacacttcctcaaccttgggaggaaggagaggttgaaggggacgccatcttgcttttctatgtcgtgatcactcatgctccagcctgttattttattatttaggaacaggttgttgctctgtcacccagggtgaagttcagtggagtgatatcaactcgctgaagcctcgacctccaggctcccgtgatcctcctgcctcagcctcctgagtaactgggaatacatgtgtgcaccaccacacctgcctaattttttttgtttgtttgttttttgttttttttgggtttttttgtttttttttttttttgaggtagaacctcattctgtcacccaggctggagtacagtggcgtgatcttgcctcaccgcaacctccacctcctgggttcaagtgattttcatacctcagtctcgagtagctgggactacaggctgggctacaggtgtgtgccaccacgcccagctaagttttgcatttttagtagagacggggtgtttctccgtgttggccaggctggtctcgaactcctgacctcaggtgatccgcctgccttggcctcccaaagtgctgggattatagacgtgaaccaccgctcctggcccatacctggctaattaaaaaaaaaaaatttttgtaggtcgagtgcagtggctcacacctgtaattccagcactttgggaggccaaggtgggtggatcatttgaggtcaggagttcaagaccagcctggccaacgtgaggaaaccccatctctactaaaaatacaaaaaagttagctgggtgtggtggtgggtgcctgtaatcccagctacttgggagcctgaggcaggagaatcacttgaacgcaggaagtgggggttgcagtgagccgagattgtgccactgcaccccaacttgggcaacatagcaagaccccgtctcgggagaaaaaaagaagaggtgggggatggccccagggactcttcatcatgtagaattgagtgtggagtcagaggagggcagaagcaggtcttccaaagtgcctagagtccagggccagggtcttaggtcatggggttaagggccagccctgatttaaaggtggagatttggggattaccagcattttgtgatatttcatgccccaggagacaatgagcttaagaagttgctcccggggatagagactcactgaatcatctgcagcctgcactggggatgccgcaggccctcgcaaagcagcatcatgcctgggaatccaacgccgttgccactgagatccatccttgtcaaattcttattggctatgagagctgcagagaggtcctcgcaggctgagctggagatgcggcacctcttcagcctggggtggaaaagaggagaaaggagctggtcatttcttttgctccagttttgtggattattttcttttgcttttttttttttttctgagacagagtcgctctgtcacccaggctggagagcagtggcatgattttggcttaccacaacctctgcctcctgggttgaagcaatcctcctgccttggcctcctgagtagctgggcttacagacgtgtgccaccatgcctggctcattttggtatttttagtagagatggggtttcaccatgttggccaggctggtcttgaactcctgggtcaagtgatcctccccatctgggcctcccaaagtgctggaattacaggcgtgagccatcatacctggccaatatatttatttcaaaatatcatgttatatatgataaattttacctgtcaagaaaagcaacaagaacaatataaaatgttttgatgctttgtagtcaaatacattcacaaaggttgcccttaaagaaattcaaggccatgtgcggtggctcaagcctgtaatctcagcactttgggaggccgaggtgggtggatcacctgaggtcaggagtttatgaccagcctggccaacacagtgaaaccccatttctactataaacacaaaaattagctgggtgtggtgatgcacccctgtaatcccagctaatcaggaggctgaggcaggagaattgcttgaactcaggaggcggaggttgcagtgagtcgagatcatgtcactgcactccagcccaggctacagagcaatactatctcaaaaaataacatatgaaaaaaatttggctaggcacagtggctcacacctgtaatctcaacagttagggaggctgaggaaggaggatcacttgaggccagaagtttgagaccagtatgggcagcatggtgaaaccccatctctccaaaacatacaaaaattagcctggtgtggctgggcacggtggctcagtctgtaatcccagcactttgggaggccgaggtgggtggatcacgaggttagagattgagaccatcctggctaatatggtgaaaccccgtctctactaaaaatacaaaaaattagctgggcatggtggcacctgcctgtagtcccagctactcaggaggccgaggcaggagaatcgcttgaacccaggaggcagaggttgcagtgagccgagatcacgctactgcactccagcctggtgacaaagcaagactccgtctcaaaaaaaaaaaaaaaaaaaaaaaaagaaattagccgggtgtggttgcacatgcttgttttcccagctactcgtgatgctggagcaagaggatcgcttgagtccaggagtttggggctgcagtgagccatgattgtgccactgcactccagcctgggtgacagagcatatcagtgtctcaaaaatttaaaaaaaaaaaaagtaaaaaaaagaaaaaaatttggagacccacacagcaggatgaccatgtgaagacagaaggcagtgatctgcaggcccaggacagaggcctcagaagaacttaacctgcccactccttgtcttggacttccagcagccccccacctgccttgagaaaatagatttatgtggtgaagccacccagtctttggcacttttttcccccctgagatggagtctcaccgtatcacccaggctggagtgcagtggcacaatcccggctcactgcaacctccgcctcccaggttcaagcgattctcctgcctcagcctcccaagcagctgggattacaggcgcccgccaccacaccctcctgatttttgtattttttgtagagatggcattttgccatgttggccaggctggtctcaaactcctgacctcaagtgatctgcccgccttcacctgtcaacatactgggattacagacgtgagccacggcacctggctttgtgacacttttttatggcagccgtagccaacgaatacaccatcccgtgatagaacctttgtgactgatccccatgagaggccacggtggggaccacctgaaacgcccagaccagcctgcactcacctcaggttctgaagtttgcagttggggtgtctgagtccttgacagagcagcttcaccccccggctgcccagggcatttcggtacagagacagctctatcaggtttggattggtgcacagggccgctgccagatgttcactgtaggcgtccagcagaacggtcctctctggtctgcttgaaggaaagacaggccactctctggtgttactggtgcttgacaactatggcctttgcatgtcatttcaccgtttatgaagcatgctatccttttttgagacggagtttcgctcttgttgcccaggctggagtgcaatggcgcaatctcagctcaccacaacctccgcctcctgggttcaagcgattctcctgcctcagcctccagagtagctgggattacaggcatgagccaccacgcccagttaattttgtatttttagtagagatggggtttcaccgtgttggccaggctgatctcgtactcctgacctcaggtgatctgcccgcctcaacctcctgaagtgctgggattacaggcgtgagccaccacatccggccaaagcatgctatcttttcatttttttttttagagggccttgccctgttgtctaggctggagtgcatggtgagatcatggctcactgtaggcttgacctcccaggcttaagcaatcctcccacctcagcctactgagaagctggggctacaggtgtgcaccatcatgaccagctaatttattttatatttttagagatggggatctcatcatgttgtccaggctgcacctggctctatctgacgctcctaatcattgatagttggtttacttgtttccctctttattatctgtctccgttctcattaggatgcgtgctctcttgggaccattggcttattcacacagtcttctgtctacagaagattgttgggtccaccgataaaagggatatagaggctgggtgtggtggctcacacctataatcccagcactttgggaggctgaggccgagagtttgagaccagcctggccaacatggtgacaccccatctctactaaaaaaatacaaaaattagctgggtgtggtggcacactcctgtggtcccagctgctcaggaggctgagacacgcaaggtggaggttgcagtgagctgagattgtgcccctgcactccagccttggtgacagagccacactctctcaagaaaaagggacttagtaatatttgttgattgaataaattctcccagacatcgacctcaatttagtcccaatgggtgttgtttagtctttgtggcactattgacactttggggccagagggactgtcctgtgtactgtaggatgtttgcagcattcccggcctttatccactagatgtcagtagtattatttgcttcccagttgtgaccaccaaaaacgtgtctccaaacatcgccaaatgtcagagcaaaatcacccccagctgagaggcactggttaagagcatgaacctcaaggccaaggtgggtggatcacttgaggtcaggagttcaagaccagcctggctaacacagcgaaaccccatctccactaaaaatacaaaaattatcctggcatggtgatgggcacctgtaatcccagctactcaggaggctgaggcaggagaatcgcttgaacccgggaggcagaggctgcagtgagccaagattgcgccactgcacaccagcctaggagaccaagagagacttagtttaaaaaaaaaaaaaaaaaaaaatcgtgggccgggtgcagtggctcatgcctgtaatcccagcactttgggaggccaaggcgggcagatcacgaggtcaagagatcgagaccaccctggccaacatggtgaaaccctgtctctactaaaaatacaaaaattaggtgggcgtggtggcgtgcacctgtagtcccagctacttgggaggctgaagcaggagaatctcttgaacccgggaggcggaggttgcagtgagctgaggtcacgccagtgtactccagcctaggcaacagagcaaaaaaaaaaaaaaaaaaaaaaaacacacgaacctaagcagccccaggggataccccagggatacttacagctgcaccaacagcgtgtgcgctcctgcggagcacctcgcgcggtcttccccgtccgcgctgtaggtggcgccatacaagtgcagcacctgggcgctcctgcagcgcttcagacagaacgaggagaccatgtgctccatcttggaggcaatgttgctgaccacgatcacctggaagtggctcagggcctgctggataaactcctcctcctggatctcgtacaagcagctgaagaactccaaggagccctgctgcagggtggagccgtcgctctgagctttgctttggatccactgcaacaggtccatcttgatgtgcggcgagaccttccagcagagactcttctccaggtggctcctggtctcctcgttcaggagtccaaacaggaagcggctggtgagtgccaggaagctcctttcagaaaacgcgtactcggtcaacagcctggtcacgtcctggtctgggcctgccccgccctccccctcgtccaggatatagtacatagctgcaaagaattcctggaaactcaagtggatgaagctgtagtacctctcacagttgatgtccttctggaagatgttcatgttgaggaaggcagagacgtcttccccgtctaggccgtgcttccggaggtcctgctcctcaaataggattttctgattccagagcccatctgccgccaaggagcacaaccctctctggttgggtgggggctggaggcgcggggcccccggcttgggttgcatcagactcagcaggtagagcatgtacactgcagtggtggtcctggacgtctgtctcaacagccccccaccctccagctgctgctggaggcaggtacacaccacccagcacaccagggggacgaagcacatggtgaagagaggctcgttgtccctcacgtaattgaagacttggcccgcctgctctgcattgtggaaatacttgtagaagtattccttcctttctgcctcagagaagcccaggatctccacatgcctggggtgctccagcagacggtggagcttctccaaagccgtgggccgtgtggtgatgagcaaagatagctcagggagcagcttcttccgaattaagctgttaagaagcagctccgtgggccgtttctcctcccagcagaggcaccagggtccctgaggatcgtggaaagaaggcttgagctcatcgaagccgtcgatgatgaaaaggaggcgctcgggaactcggatgagctcctggagaggcgcgctgggctcaggccagcagctgaagatgaggtcttgcatgctgcattccgtggcactctggttcatctccctgcagttgatgtagaagagataatcaaatctgccttggaagagcttcccgtccgcccagtccagcatcaccttgtgtgccagcatggacttgcctatccctgccgcgccttgcatgaccacggtgcgcggtggctcggggcgctcctcgtctggctcaaagagggtctctatcttgatggggctagcctggtgtcccacggtcctcgcgtgtccccggcctgtgtccagaagctgctgctggacctgcatggggtttgagtgctccttcaccagcaggagccgggtgtaccggtggctgaggttgacacattcccctaggcgcgcattgcggtcttccatgagccggaatttcctgcggacatagtccctgtaggtttcctggggatctaggggagaggaatgaaggttttgtggaagactcatcagcagcctctaatgagttcacgaggtaaagcgctcctcatgtggctcaaagaaggtgtgtgcctgtagttccagctactcaggaggctgagatgggagaatcacttgaacccctgaggtggaggttgcagtgagctgagatcgcaccactgcactctagcctgggcaacagagccagactccatctcaaaaaaaaattttttttaattaaaataatttatttgttttgagactaggttataagactggctaattttttttttttttagatggagtctcgctctgttgcccagcttggagtgcaatggtgtgctccctgcaacatccacctcctgggttcaagtgattctccagtctcagcctcccgagtagctgggattacaggcacatgccaccaggcctggctaatttttgtatttttagtagagacggggtttcactatgttggccaggatggtctcgatctcttgacctcatgatctgcccacctcggccttccaaagtgctaggattagaggcatgagccactgtgtccagccccacaaagtgactttcagcaaaggatttatagaacgggtacattaccagatagtgcagacatgaatctgccttttttcaaagggggcacaagccaggtgcggtggctcacgcctgtaatcccagcactttgggaggtccaggtgggaggatcgcctgaactcaggagtttgagaccagccggagcaacatagtgagaccctgtctctataaaaacaaaagaaagagaaaacaaagggggcacagaaaacttgggagcagtgcttctcaaactttttttttttttcagtacagacagggtcttgctgtgttatccaggctggtctacaactactagcctcaaacaatcctcctgcctgagccccgcaaaatgctgagattacaggcatgaaccaccatgcctggctgtgcttctccaactttaagacgcatacatatcatgcagcaatcttgttagaaatgcagtccctgggctaagtgcagtggctcacacctgtaagagatcgccccactgcactccagcctgggcgacagcgtgagactctgcctcaaaaaaaaaaaaaaaaaatctagaacaatgttcttaattggggtgactgtgtcccctagttccccaggggacatttggcaacgggacaagtgggttggttgttacaactgggaaagtactactgccacatagtggatagaggccagaggtgctgctcaacatcccaggaaccacaggacgaccccatagcaaagaacgctctggccccgaaatgccaacagtgccaatgtggagaaaccctggtctggatacaaatgcatcccttggtattggatgccagcagaggcccatgatagctgcctgagagaagcttaaaaaaaagaatctgagtttgatactaaaattttcaaaacaaatatgtgtacttttaattatagtgacatacacataaaatttaccattttaaccactttaaagcgtacaactctgtgacactaagttcacgatgttgtgcaatcatcaatatctctttttttttttttttttgagacagagtgttgctctgtcccccaggctggagtgcagtggcatgatctaggctcactgcaaactccgcctcccaggctcaagtgattctcctgcctcagtctcctgagtaactcgatttacaggtgctcgccaccacacccagctgatttttgtatttttagtagagacggagtttcaccatgttggccaggctggtttcgaactcctgacctcaagtgatctgcccgcctcggcctctcaaagtgctggaattacagacgtgagccactgtgcctggccgccaatgtctatttccagaatgctttcagcattctaaacagaaactccatatccattaaatattaactcataatttctcctctccctggcaactgctattcttttttttttttcttttctttttttttttttttttttttgagacagagtcttgctctgtcacctgggctggagtgcggcggcacgattcggcttactgcaagctccgcctcccaggctcacaccattctcctgcctcagcctcccaagtagctcagactacaggtgcctgccaccacgcctggctaatttttttgtatttttagtagagacaaggtttcaccgtgttagccaggatggtctcgatctcctgacctcatgatctgcccgcctgagcctcctaaagtgctgggattacaggcgtgagccaccatgccgggcgtggcaactgctgttctactttccgcctctgaatttgactactctaggtgccttagataagtggaatcatacaatatttgtacccctctcccgcctttttttttgagacagggtctttctcactccccccaggctggagtgcagtggcgtgaccttggctcactgcaacttcaacctcctgggctcaactaatcctcccacctcagcctcctgagtagctggatctacaggcacaagtttccatgcccagctaatgttcgattttttgtttttttttgtagagatggggtcttgcttgttgcccaggctggtctcagagcctggcctcccaaagtgcagggattacaggcgtgagccaccttgctcagctggtgaacccactcttattctactttagtagagctggagactagattcatttcatgctccccttgaaaaaaatagccagaaacatttgtggcattgttaacagtgttgctgtctacccagcagactgtaccccggtttcttccctgccagcaaacctgattctgtttggttggtggatgctgattcatgactcgagtgagtggtgaatcctgccccttcacaagcctcagaggatgaattatggttttgctaaatcagtcatgagtaacctcgttcccctctgtcagtggttgctctgagaatgggcagattccccagtactgaccagtgggttacgtggatgtgactggtaacagggaggaagaaggcctttacccttcctttctttgctttttttttaagagatggagtctcactctgttgcccaggctggagtgcagtggtgcaatcttggctcactgcaacctctacctcccaggttcaagtgattcttctgcctcagcctctgagtagctgggactacaggtatgctccaccacaccctgctaattttgtatttttagtagagacggggttttgccatgttgtccgggctggtcttgaactcctgacctcaggtgatctgcccgctttggcctcccaaagtgctgggattacaggcgtgagccactgtacctggcctcttagccttccttgttgcccctgcgtgtatgagatggtttggtagccatctttcagccaggagatgacacgtgtcaggacaaaatgctgacgtggaaaggttgatgagttgaaacacaggaggaaactgcccctttgatggtgtcattaatccaccccacgaattcctcaatcacgcgtttgtggttggcctacactccgtggggtcagctgctctgtgtagatgaatacatgtaggtacatggcttgaggctcaccttttcttggagtgacaagagagacttccagaaggcatgttgactggttcccaagtgaggacgggccaccaggtggggtatctggaagagaaattgtggaagatgagctagcacgcatctggctagtagcaccgcgtcatattagctgcgattacgtcgaaatgcctgcataactccctggtcacccgcaccccagaatgttcagtagtgactgcataggccgtgtgtgggaaatagctcatcccttgttccttgtagcgcaccctcctccctgggtccccctcatggtcattggcacctccatccatccaatcagtctttttttttttttttttttttgagacggagtcttgctctgttgcccaggctggaatgcagtggcatgatctcggctcaccacaacctccacctcctgaattcaagcgattctcctgcctcagcctcacgagtagctggcattacaggtgtgcgccacaatgcctggctaatttttgtatttttagtagagacggggtttcactatgttggccaggctggtcttgaactcctgaccttgtgatccacctgccttggcctcccaaagtgctgggtttacagatgtgagccactgcacctggcaccaaccaatctttttgactgggaagttctgagtcagtctggactcctcccttgtcagctctgggccacatctcatccattatcttttcttttttcttttcgagacggagtctggctctgttgcccaggctggagtgcagtggcacaatcttggctcactgcaacctctgcctcccgggttcaagtgattctcctgcctcagcctcctgagtagctgggactacaggcatgtgtcaccacgcccggataatttattttgtatttttagtagagacagggtttcaccatgtgggtcaggctggtcttgaactcctgacctcgtgatccacccaactcggcctcccaaagtgctgggattacaggcgtgagccactgcgcctggcgactctgtctcttaaaaatattttaatttttttttttttttttggtagagattaggtctcagtatgttacccaggctggtctggaactcctagcttcaagcagtctttcgaccttggcctcttgaagtgttggaaatagtggtatgggccatcgtgcccagcccaaaaaaggccttcgtttggatatatcataagattctacacatcgagtccttccttggcatctttggtcctcagaaggccccccaaagtcctaagtgtgagttcctttgctctcactccatgagaaagtcttcccacctggctagttctcccatcagctgagccagcggcaccccatctggtcctcactctgataagttttcacctccctgctggttgctagtccatgaaatgattcatgaaagcaaagaacatccttttgaaggagccaggaggcaccccaccctcttgttactacacagcccgccccccccaacagtctctgtagcttcatgtgaccctcttggcatatggggacaccttccctgtgagtctgtgtgactaataaactgttgtctttcctctgttcagtgctggctctggtagattcagtcatctggcaccattttatttatttatttttatttatttgagacagtctcgctctgtcgcccaggctggagtgcagtggcgcgatctcggctcactacaatcttcacctcccaggtttaagtgattctcctgcctcagtctcccgagtagctgggactacaggcacccatgaccacgcaggtggtggtaaaaatacaaaaaaataatttttgtatttttagtagagatgcggtttgaccatgttggccaggctggtcttgaactcctgacctcaggtgatctgcctgcctcggcctcccaaagtgctgggattacaggcgtgagctactgcacccggccactcaaaaatttttaattggagaaggttatcattgagaggaaaggggaaaatagggaattgtttaatgggtatcgagtttgttttgcaagatgaagagttctgcagattgaatgcacatcagtgtaaatgtacaacactcagcagcacacttaaaaatggttaagagggccagggcgcggtggctcacgcctgtaatcccagcactttgggaggccaaggcgggtggatcacaaggtcaggagatcgagaccatcctgggtaacacggtgaaaccccgtctctactaaaaatacaaaaaaaaattagctgggcatggtggcaggcacctgtagtcccagcaatttgggaggccgaggcaggtgggattacctgatgtcaggagttcaagactagccttaccaacgtggtgaaaccttgtctctattaaaaatacaaaaatgagccaggcatggtggcgcgtgcctgtaatcccagctactcgggaggctgaggcaggagaatcgcttgaaccagggagtcagaggttgaagtgtgctgacatcgcatcattgcactccagcctggtgacggagcgagactccatctcaagaaagaaaaagtggttaagaggaggctgggcgcggtggctcatgcctgtaatccctgcactttgggaggccaaggtgggtggattacctgaggtcaggagttcaagaccagtctgaccaacatggagaaaccccatctctactaaaaatacaaaaattagctgggcgtggtggcagatgcctgtaatcccagctacttgggaggctgaggcaggataattgcttgaacccatgaggcagaggttgcagtgagccgagatcgcgccactgcactccagcctaggcaacaagagtgaaattccatctcaaagaaaaaaagaaaaagagggcaaatttcatgttttgtgtattttagcactatttatttatttatttatttatgagacagagtctcactgtgtcgtccaggctggtgtgatgttggctcactgcaacctctgcctccagggttcaagtgattctcctgcctcagcctccggagtagctgggattacaggcatgtacaaccacgaccagctaatttttgtatttttagtagagacagggtttcaccatgttggccaggctgttgtcaaattcctagtctcaagtgattcacgtgcctcagcctccaacatgctgggattacaggcatgagccactgcagctggttggcaatttttttttttttttgagagagggtcttgctctgttgctcaggctggagtagtgtggcatgatcttggctcactgcagccttcacctcctgggcttaagtgatcctcccatctcagcctcccaggtagctgggtctgcaggcatgcaccactgtgcctggtcaattttgtagagaaggggttttgccatgttgcctagaccagtctcaaacttctgggctcaagtgatctgcctgcctcagcctcccaaagtgctgggattataggtgtggccacattttttttttttaaaggtaatccaggccagcgcggtggctcacgcctgtaatcccaacattttgggaggctgaggtgggtggatcatgaggtcaggagattgagaccatcctggctaatatggtgaaaccccatctctactataaatacgaaattagccgggcgtggtggcgggtgcctgtagtcccaggtactcgggaggctgaggcaggagaatcgcttgaacccgggaggcggaggttgcagtgagccgagaacgcaccactgcactccggcctgggtgacagagtgagactccgtctcaaaaaaataaataaataaaaataaaaaaggtaattcttgaaaattgcagctgaaaaaggcctcagagatgttctccctcagtgtttcctaggcatgccgcgagaaccagccacatcaaaatgcagattcctgttgcctaagacctgctgattcagaatcacgggttgagggtcttggattccccattggccacaagtgtctcgagagactcttacgcacagtaacatgagaactgccgatcttgcctgatgcccttgttttacagatggagatggaggcccaggggcatatcgattctccagcatcacacagacagaaagagcaaagctagacatctgtctccttgggaacgctgagctgcctctcagtagactaaacggatgcagtccggggaagaacgctcggcaaatggttatgcattgtcaatgctgggagagatttaggcggaagagggagaaaagtgggactttacttttgattctatatttgtacattatttccatttcttaaaataactatgtaacacttccatttagatataattatacaatatgacaagtaagtaaattgatacttttttctttcttttctttttttgagatggagtctcgcttttgtcatccaggctggagtgcagtggcgtgatctcggctcactgcaacctccgcctcccgggttcaagtgattctcctgcctcagcctcccaagtagctgggattacaggcgtgtgccactacgcctggctaatatatatatatatatatatatatatatatatatatatatatatatatgtgtgtgtgtgtgtgtgtgtgtgtgtatatacatatgtgtatatatatgtatacatatgtgtatatatgtgtgtatgtatacgtatatatatgtatgtatacgtatatatatgcgtatatatgtatgtatacgtatatacgcatatatatgtatgtatacgtatatacgcgtatatatgtatgtatacgtatatatatacacatgtatacatatatgtatgtatacatatatatacacacacacacacgtatatatatatgtatgtatgtatattaagacggagttttgctcttcttgtccaggctggagtgcagtggcgggatcttggctcaccacaacctccgtctcctgggtggtggagaaaagggaaagagaaaaagagaggagagggagagaaaagaaaagaaaggaaggagggaaggaaagggaaaagaagggaaaagaaggaaggaaggagggaagaaaggctacaaacaagtgtctttggttttttcagtcattaaagactttgttttttacagagatgtttcccagcacactactactggcacacctcattaacgacgagtcattaagctttgcagaagtgactgtgtatatccagttattggcagggcttgcttactcattcagcaaatgttcaccaaagtttgctcggttcctagccccagccagacactggaatcgcagagaatcacacaggggagtcaagactctttctgcctttgaaggcgtccatgtcacagtagagaaaacaggtgagaaattacattaaaaaccacagctcaagcagggtgcagtggctcacgcctgtaattccagcattttgggaggccgaggtggatggatcacctgaggttaggagttcgagaccagcctgaccaacacggtgaaaccccgtctctactaaaaatacaaaaattagctgggtgtggtggcacgcacctgtagtcccagctactcaggaggctgaggcaggagaatcactggaacccgggaggcggagcttgcactgagccaagattgtgccactgcactccagcctgggcgacagagtgagactctgtctcagaaacaaaacaaaacaaaaaaccacagctcaaatggggctctgtggtgcacacctgtagttccagctgttcaagaggctgaggcaggcggatcacttcagcccaggagtttgagtctagcctgggcaacatagtgagaccctatctctaaaaaataaattattttttttttttttgagacggagtcttgcactgtcacccaggctggagtgcagtggcacaatctcagctcaccgcaagctctgcctcccaggttcacgccattctcctgcctcagcctcctgagtagctgggactacaggcgcccatcactgcgcccagctaattttttgtaaaaaataaaaatatttttaaaaaaacaattccacagctcaagtgccatctctgccacttcagcaatagcctatatttgctgagcacttgctacctgctctgaattgtgttaagcactttgcatgtattatctcttgagcttatgcctgagtataaatcatattttttcttttttttttttttttttttttgagacagagtcttactctgtcacccaggctggagtgcagtggcttaatcttcgctcactgcaacctccaccgcctgggttcaagtgattctcctgtctcagcctctagattagcagggattactggcgcccgccaccacacccggctaatttttttgtatttttagtagagacagggtttcaccatgttggccaggctggtctcgaactcctgacctcaggtgatccatccacctcaatctcccaaagtgctgggattacaggcgtgagccaccgcacccagctcattgtgattattttatgagatagaagatataataaaagaaatcatgttggctgggcacggtggctcacacctgtaatcacagcactttgggaggccgagacggctggatcatgaggtcaggagatcgagaccatcctggctaacatagggaaaccccgtctctattaaaaatacaaaaaattagccaggcatggtggcgggcacctgcagtcccagctactcgggaggctgaggcaggagaatggcgtgaacccaggaggtagagcttgcagtgagctgagattgcgccactgcactccagcctgggcgacagagcaagactctgtttcaacaacaacaacaaaaagaaatccaagagtgctaaggaggcacagaagtggggtttctgagccagccagagtggtgggagcgaggaatcagaaggagtgggggaagaggagtaaatactttactttagagaaggtagtggcttcaaggtttcagtaagtaatacttttccaggcaaagaagatggagaatattccaggcagaacacagcatgaacaaagaccaaagggatgaaattagaattctgtacacagtcataaaaaagaacaaaatcatgttctttgcagtaacatggacgcagctggaggccattatccaaagcaaactaatgcaggaatagaaaaccaaagactgcatgttctcacttataagtggaagctaaacattgggttctcatggacagaaagatgggaagaagagacactggggactcgtggcggggagaaatctcaccattgggtactattactatgttcaagtacctgcatgataggatcaatcttactctgaatctcagcatcactcaatatacccatgtaacaaacctgcacatgtaccccttgaatctaaaagttgaaatttttatatagatatagatgtgtgtgtacgtaaattagaattccagatctcccaggctcagggattagtatgaaagaaaagggaattggtggccaggcagtggtcattcatgcctgtaatcccagcactttgggaggctaaggtggaagctcgcttgagcccaggagttcaagaccagcccgggcaacataaggacacctcatcttggccgggcacagtggcttatgcccgtaatcccagcactttgggaggctgaggtgggtggatcacgaggtcagaagttcaagaccagcctggccaagatagtgaaaccccgtctctacaaaaaatacaaatacaaaaaattagccaggcatggtggcaggtacctgtaatctcagctactcgggatgctgaggcagaaaattgcttgaacctgggagacggaggttgcagtgagcggagattgcgccactgcactccagcctgggcaacagagcgagactcagtcttaaaaaaaaaaaaaaaaaaggatacctcatctctttcttaatttatttttgagatggggtttcactctgttacccagcctggagtacagtggtgcaatctcaactcactgcaatctccacctctcaggttcaagcgattctcctgcctcagcctcccatgtagctgggactataagcgtgtgccaccacgcctggctaatttttgtatttttagtagagacagggttttgctatgttggccagactgatctcgaattcctgacctcaggtgacccacccgccttggcctcccaaagtgctgggattataggtgtgagccactgcacctggctacctcatctcttaaaatatatatacacacacacatatacacacacatatatatacacatatatacacatatatatacgtgtgtgtatatatatataaattccagatctcccaggctcagggattttatatatatgtattttaaatatttattttaataatatatgtattaaatatttaatatataatatttattatttatatatatttatataatataccatatttatataatatagtatatttatataataaatatatactatatttatatataatatataccatatttaatatatatttaataatataattatatacatattttaaatatatatttaaaatatatgttttaaatatatatatttaaaatatatgttttaaatatatattttaaatatatatttaaaatatatattttaaaatatatttatttaaaatatatatttaaaacatatattttaaatatatatattttaaaaaaatatattttaaatatttgaggcaaggtctcgttctgtcacctaggctggggtgcagtggcaggatcatagctcaccgcagcctcgaccttctggtctcaagtgatcctcccacctcagcctcctgagaagctgggatcacagacgtataccaccacacctggctaattttttttatttttggtagagacagagcctcactatgttgtccagactggtcttgaactcctcacctcaagtgatctgccctcttcagcctcccaaagtgctgagattacaggtatgagtcactggacccggctggcattctagccttgcctgtcccgccacctccttacccctcaccaggtcctctctctgtcctctctcccacaggtccttcctgtttatccgctcaaaggtgctgagagccaacctccaggcctcctctggcccgaagtgggtgatgagcagctgggccatttccaggggaccggccttctccatgcttccccaggggatcttgccttctcccagctctgtcgcggtccccaggtataacttgaacttcttcagttccacagcctcgagttcttccaagtaggtggacaggcgacagaggccgtccctgcctgcggttcgtagcatgggggtgccgtgagccccaaaggagaggacctggaggctgagatgctcctatgcacgggacacagggcgaccccagcacaccttccattgcatcattcacaggcagcgggcggagaggctgagccagtggttggaggagagagcaagggaggaaagaccttttgctgaaataatgctttctcactcttcagttccctcctgccctgccccactcaccaatggctgttctgggtggagaagaggaagttcggggggagattaagaaatccgaggagccacttggctgatgaaaaagattttcacttctgctgtctcttcctggatctcttgacaaaacagtcactctctttccgctttcctcttgttttcctcatttcactagtgtgtgtggtagagtgtattatcaaaactgcgactgcgcctcttccagggagaatttttttttttttgagacagagtcttactctgtggccctggctctgcgatcttggctcaccgcaacctctgcctcccaggttcaagcgattctcccacctcagcttcccttgagtagctgggattacaggcgccggacaccacacccagctaatttttgtggttttagaagagacagggtttcaccatgttggtcaggctggtctcgaactcctgacctcaggtgatccacccgcctcagccttccaaagtgctaggattacaggtgtgagccaccgtccctggcttttttttttttttttttctttgagtcagagtctcactctgccacccaggctagagttcactggcgtgatctcagctcactgcaacctccgcctcccaggttccagcgattctcccacctcagcctctcaagtagctgggaccacagacatgcgccaccatgcccagctaagtttttgtagttttggtagagacaaggtcttcttatgttgcccaggctggccttgaactcctgagctcaaacgatccgcccacctcagccttccaaagtgctgggattacaggcatgagccactgagcccagcctcagggagaattattaaggacctcacgtaggtctgctattttttttctgttctctcagtcacaagagtggcatgagagggactttgcggtaggcaggatgatggtccccaaagatattcatgtcctaatggccagaacctgtgacatttcaccctacatagcaaaagagacttagcatatgtgaccaaatgaaggcacttcagatggggacattatcctggttatctgggcaggacccatggaatcacaagagtcttttttttgagacagagtcttgctctgttgcccaggctggagtgcagtggcacgaactcggatcactgcaagctccgcctcccaggttcacaccattctcctgcctcagccttccgtatagctgggactacaggtgcccgccaacacgcctggctaattctcttttttttgtatttttagtagagatggggtttcaccatgttagccaggatggtcttgatctcctgacttcgtgatccacctgcctcagcctcccaaagtgctgggattacaggcgtgagccaccgcacccagccacaagagtctttataagaagaagacaggagggttagtgtaagaggaagatgtgactgggtgcaatggctcatgcctgtaatcctagcacttggggaggccaaggcaggtagatcacctgaggccaggagtttcacaccagactggtcaacacagtgaggccccatctctacaaaatatgtgttagcagaatttatgaattctgatggaagagcaagtttataattccctctgtctcctgcatcatgccaactttgtttcatgctcctaatcaattaagacccctcagacacacacacacacacacacacacacacacacacacacacacacacacaaaagccttcatagccaggcgcagtggctcacacctgtaatcccagcactttgggagactgaggcgggcagatcacctgaggtcaggagtttgagaccagcctggccaacatggtgaaaccccgtctctactaaaaatacaaaaattagccgggcttggtggcacgcacctgtaatcccagctacttgggaggctgaggcaggagaatcacttgaacccgggaagcagaggttgcagtgagccgagactgcgccactgcactccagcctgggcaacagagcgagactctgtctcaaaaaaagaaaaaaaaaattagctggggtttggtggcgggtgcctgtagtcccagctactcaggaggctggggcaggaaaatcacttgaactcaggaggcggaggttgcaatgagccaagatcccgccattgcactccagcctgggtgacagagtaagactccgtctcaaaacaaaacaaaaaaaaccttcacagctttttatgagacattctcccacatccagtcccttccaggactaatattctgttgcatggcatgcagcagttttgagcaggggagggatggagtcaggtctgggttaaggaagattcctcaaggcccttgtggaaggcagaccaaacagaggaggcctggattgggagagcgagaagctgaagccttcatgtttcaggagatggagataatgcctgagtaagggcaggcggtgggtgcatcctgggagtgtggggatggcagtgatcattagaggggaggagaaaggtttggcaaacctgaactacctacagaccccatctgagcttcctcaagtggctcacgacgcaggctccttccacgccactgctgcaggtggtggtaaaactaatttctaggaattcggaagcgaggcttgggggaagctgaatccacatctgtctacttcatgcttccactttcaagatagaactttctcatggggaaagaagagaattggcaacttctatagctgcttctgggcttagtgccatttctggaaacacaagaatgaatctaaagacaaggaatgccattttcctttttttttctttttttttttttgtttttagtagatggggtttcaccatgttgcccaggatggccttcaactcctgagctcaagcgatcctcccacctcggcctcccaaagtgctgggattacaggcatgagacaccgcacccagcccaattttccttttttaaaaaatttttttgctgggtgcagtggctcacgcctgtaatcccagcattttgggaggctgaggcgggtggatcatttgaggtcaggagttcaagaccagcctggccaacatggtgaaaccccatctctactaaaaatacaaaaataacctgggtatggtggtgggcacctgtaatcccagctacttgggaggctgaggcagaagaatcacttgaacccaggagtggaggttgcagtgagccgagatcacatcactgcattccaggctgggtaacagagacaccatctcaaataaataaataaataaataaataaataatagaagttgtcaccaccacctgcttgccactcccttgaattctttcctgtgtgaagccaagaactatcccggggtaagccctgttttggggcctcacttgcctagcatcacaaggataaacccattcaaagcaggtgctaatttgccctgttggttttcaactagaagagaaattattatcatcagggacatttataaaaattatatatagaaggctgggtgtggtggctcacgcctgtagtcccagcactttcggaggccaaggtgggcagatcacttgaggtcaggagtttgagaccagcccggccaacatggcgaaaccccgtctctactaaaaatacaaaaattagccggatgtgctatcgcgcacctgtaattccagctactcggggggctgaggcacgagaatcacttgaaccttggaggtggaggttgcagtgagccgagatcacgccactgcactccagcctgggtgactgagtgagactctgtctcaacaacaacaacaaattaaaaataaaaaaataaataaaaatacaaaaattatccaggcatggtggcgtgtgcctgtaatcccagctactcgggaggctgtggcaggacaatctcctgaacctgggaggcggaggttgcagtaagccgagatcacaccactgcactccagcctgggccacagagtgagactccgtctcaaaaaaaaaaattatatatagatgaaatattttatatacattacaataagaattataaatatataaatatgtatatgaaattggtccctctctagacttcctgaatcaggatcttggtggggcaggggccatcaaacatatgtttctttttcctttttttcttatattaattttttgaatagagatgaggtctcactatgttgcccaagctggtctggaacacctgagctcaagtgatcctcccacctcagcctcccaaagtgctgggattacaagtgtgaaccaccacgcctggctaaatacatgtttttataatataaagctcccctagtgattctgctgagaaacatttctctgtgttagtactagaaaggcacagagaaatgcttgtttttctatcagcagaatttcccttttgccattccggaagagacctgtttcctttgagggaatactttgagaagtcacttgagtatgaaatctgttaactggagaaattttgcagtatggtgtttgcttgtttgcaggtaaaactaaatcattcaggataaaaaggcattttagaagccacgtggggaaaggcagaaggaaaggaaataggaggtgtcaggtgcctgggaagaacatttggagggtttatggagatgagtaataggaatttaaattgctttactatatggtgtacgatgaaaactgtcttctaccccaaccaaacccatcatcagtaaaacctatgctgctcgctagcacgttgtgaacatggatttgctgcgtttttttgttttgtttttttgctttttctgagacagtttcgctctttctgcccaggctggagtgcaatggcgccatcttggctcactgcaatctcctcttctcgggttcaagcgattctcgtgcctcagcctccaagtagctgggaccacaggcgcgtgccactacacccggctaatttttgtatttttagtagagacagggtttcactgtgttggtcaggctggtctcaaactcctgacctcaggtgatctacctgcctcggcctcccaaagtgctgggattacaggcgtgagccaccatgcctggcctgatttgcttttacaggcagtgtgacaaaatggtgtctctaactggcattgaatgactgtcccgtgggaggccacatctgaggtttctgtgcctctttgttgtcacatagagaggataccgagtgctacccactgttcccatgaccatcaccagcatcactagctcaccacgaactggctagaaaatggaaatcatcattctccacctatgaatggggaaactgaggctgagagggaagctctgagtgtgtggcctacacagcagtgctggaaaatgatggagacgactctgaaagccagttctggctccaaacttcaagcagctaaaatcctcatcagcttgtacaatgaggccaaccctccaatttgaaagagggatagactgaggtccaaagtagcaaagtcacctgcagaccatcatatagcactcaaaagttgcccaggggctgctaggatgcagtcttcttcttcctttttttttttttttctaatgagatggagtcttgctctgtcacaaggctggagtgcagtgatgttatctcagctcactgcaacctccacctcctgggttcaagcaattctcctgtctccgcatcccgggtagctgcgattacaggcacctgccaccactcccagctaatttttgtatttttagtagagacggatgatctcgatctcctgacctcgtgatccacccgcctcggccttccaaagtgctggggttacaggcgtgagccaccgcgcccagccacagtcactttcatcagggcctgagtgtaggggttgtgaaacttcctcccctgtgagctatgtcctcacttttaccacagaccctggcaggaaacatcctggctgtgactttccctgtgggttttaggaacagttgcacagggtccagccccaccacaggctccactacccttgccctgatcaatcgggaagattcagccacagctgatggtactaaaactttggtttttttttttttttgagatggaatctcactctgttgcccagactggagtgcagtggtgccttctcagctcactgcaacctccgcttcccaggtttaagtgattctcatgtctcagtctccgcagtagctgggattacaggcacccaccaccatgcccggctaagttttgtatttttagtagagatggggtttcaccatgttggccaggctggtctcgaactcctgacctcaagtgatctgcccgccttggcctcccaaagtcctgaaattacaggcatgagccacctcactcagccggatgatacttaaaacttagtatcagggagaagtaggtggcacttaaagaaaatgtattatgttccttccttctcagaccaataatctccctctgtattagctaagtttcctcagagaaacagaatcaatggaagggagacatccacacacagagagttagagagaaagggatttattatggggactggctcacaggcatgcagagccctaggagttgcaccatctgccagctgccagctgtagaagcaggaaagctggtgtggaattcactccaggaccaaaggcctgggaaccaggagctccgatgtcctagggcaagagaagatggactttccagtttaaaaaaagagggcaggctgggcgtggcagctcacgcctgtaatcccagcactttgggaggccgaggtgggcagattacctgaggtcaggagttcgagctccacctgaccaacatggagaaaccccatctctactaaaaatacaaaattagctgggtgtggtggcacatgcctgtaatcccagttactcgggaggctgaggcaggaggatcgcttggactcaggaggcggaggttgcggtgagccaagatagcaccatagtactccagcctgggcaaaaaaaagggcaggccgggcgcagtgtctcaaacctgtaatcctagcattttgggaggatgagccaggaggattgctcgagcccaggagtttgagaccagcctgggctgtcaggcctctgagcccaagccaagccatcgcatcccctgtgacctgcacgtatacgcccagatggcctgaagtaactaaagaatcacaaaagaagtgaatatgccctgccccaccttaactgatgacattccaccacaaaagaagtgtaaatggccggtccttgccttaactgatgacattaccttgtgaaagtccttttcctggctcatcctggctcaaaaagctcccccactgagcaccttgcgacccccactcctacccaccagagaacaaaccccctttgactgtaattttcctttacctacccaaatcctataaaacggccccacccttatctcccttcgctgactctcttttcggactcagcccacctgcacccacgtgaaataaacagctttattgctcacacaaagcctgtttggtggtctcttcacacggacgcgcgtgaaatttggtgccgtgactcggatcgggggacctcccttgggagatcaatcccctgtcctcctgctctttgctccgtgagaaacatccacttacgacctcaggtcctcagaccgaccagcccaagaaacatctcaccaatttcaaatctggtaagcggcctctttttactctcttctccaacctccctcactatccctcaacctctttctcctttcaatcttggcgccacacttcaatctctcccttctcttaatttcaattcctttcattttctggtagagacaaaagagacacgttttatccgtgaacccaaaactccggcgccggtcacggactgggaaggcagccttcccttggcgtttaatcattacagggacgcctctctgattatacactcacatttcaagggtgtcagaccacgcagggacgcctgccttggtccttcaccctcagcggcaagtcccgctttcctagggggcaagaaccccccaatcgcttatttccgcaccccaacctcttatctctgcgccccaatcccttatttccacaccctgacctcttatctgtgtgccccaatcccttatttccgtgccccaaccccttctctgctttcctggagggcaagaaccccccaccccttctccgtgtctctactcttttctctgggctttcctccttcactataggtaagtttccaccttccattcctccttctcccttagcctgtgttctcaaaaacttaaaacctcttcaactcacacctgacctaaaacctaaatgccttattttcttctgcaatgccgcttgaccccaatacaaactggacagcagttccaaatagccggaaaacggcactttcaatttttccatcctgcaagatctaaataattcttgtcgtaaaatgggcaaatggtctgaggtgcctgacgtccaggcattcttttacacatcagtcccttcctagtctctgtgcccagtgcaactcgtcccaaatcttccttctttccctcccgcctgtcccctcagtaccaaccccaagcgtcgctgagtctttctaatcttccttttctacagacccgtctgacctctcccctcctcgccaggccgagctaggtcccaattcttcctcagcctccgctcctccaccctataatccttctaccacctcccctcctcacacccggcccggcttacagtttagttccgcgactagctcctccccacctgcccaagaatttcctcttagagaggtggctggagctgaaggcagtcagggtacatgtacctttttctctatcacgcctctctcagatcagtcaacgtttaggcactttctcatcagaccccactaaacatatacaggaattccaatatctaactctgtcctacaacaacctggagtgacttaaatgtcatcctgacttctaccctctccccagatgaacgggaaagagtttgttctctagcccaatctcatgctgctaaccactggcttcatgagccagacctccaggaaggcattagagcagttccccgagaggatccccagtggaactaccaggcaaattccccaggtatagctaggcgagattacatggtttcctgcctagttgaagggcttaaaaaagcagcttacaaagctgttcattatgacaaacttaaagaaactacccaaggtaaagatgaaaacccagcccaggtcatggctcgtttggcagcaacctttagacgctataccgccctagaccctaaaaggtcaaaaggccgtcttattctcaacatacattttattacccaatctgctcccgacatgaaataaaactccaaaaactggaatctggccctcgaaccccacaacgggacttaattaacctcaccttcaaggtgtgtaataacagaaaaaagttgcaattccttgcctccactgtgagacaaaccccagccacatctccagcacacaagaacttccaaatgcctgaactgtagcagccaggcgttcctccagaaccttcttcccccaggaacttgctacacatgctggaaatctggccactgggccaaggaacgcccgcagcccgggattcctcctaagccgcgtcccatctgtgtgggaccccactgaaaatcggactgttcaactcacctggcagccactcccagagcccctggaactctagcccagggctctctgactgactccttctcggcttaccggctgaagactgatgctgcctgatcgcctcagaagccccgtagaccatcacggatgccgagctttaggtaactcacagtggagggtaagtctgtccccttcttaatcagtacggaggctacccactccacattaccttcttttcaagggtctgtttcccttgcctccataactgttgtgggtattgacagccaggcttctaagcctcttaaaactcccccaattctggtgccaattagacaatactctttcaagcactcgttttcagttatccccacctgcccagttcccttattaggctgagacactttaactaaattatctgcttccctgactgttcctggactacagctatatctcattgccgcccttcttcccaatccaaagcctcctttgtgtcctcctcttgtatccccccaccttaacccacgagtataagatacctctactccctccttggcgaccgatcatgcaccccttaccatctcattaaaacctaatcacccttaccccactcaacgccaatatcccattccgcagcacgctttaaaaagattaaagcctgttatcactcgcctgctacagcatagccttttaaagcctataaactctccttacaattcccccattttacctgtcctaaaaccagacaagccttacaagttagttcaggatctgcaccttatcaaccaaattgttttgcctatccaccgcgtggtgccaaacccatatactctcctatcctcagtacctgcctctacaacccattattctgttctggatctcacacatgctttctttactattcctttgcacccttcatcccagcctctcttcgctttcacttggactgaccctgacacccattaggctcagcaaattacctgggctgtactgccgcaaggcttcacagacagcccccattacttcagtcaagcccaaatttcatcctcatctgttacctatctgggcataattctcataaaaacgcacgtgctctccctgccaatcgtgtcctagtgatctctcaaaccccagcaccttctacaaaacaactcctttccttcctaggcatggttagcgtggtcagaattcttacacaagagccaggactgcaccctgtagcctttctgtccaaacaacttgaccttactgttttagcctagccctcatgtctgcgtgcaggggctgccgctgcattaatacttttagaggccctcaaaatcacaaactatgctcaactcactctctacagttctcataacttccaaaatctattttcttcctcatacctgacgcatatactttctgcttcccggctccttcagctgcactcactctttgttgagtcccacaattaccattgttcctggcccggacttcaatccagcctcccacattattccaggtaccacacctgacccccatgactgtatctctctgatccacctgacattcacctcatttccccaaatttccttctttcctgttcctcaccctgatcacgcttgatttattgatggtggttccaccaggcctaatcgccacacaccagcaaaggcaggttatgctatagtacaagccactagcctgcctcttagaacctctcatttcctttccatcgtggaaatctatcctcaaggaaataacttctcagtgttccatctgctattctactactcctcagggattattcaggcccccctcccttccctacacatcaagctcgaggatttgccccactcaggactggcaaattagctttactcaacatgccctgagtcagataactaaaatacctcttagtctagataaatactttcactggataggtagaggcctttcctacagggtctgagaaaccaccgcagtcatttcttccctcctgtcagacataattcctcagtttagccttcccacctctatacagtctgataacagatgagcctttattagtcaaatcagccaagcagtttttcaggctcttagtattcagtgaaacctttatatccctacggtcctccgtcttcaagaatattagaatggactaaaggtcttttaaaaacacacctcaccaagctcagtcaccaacttaaaaaggactggacaatacttttaccactttcccttctcagaattcaggcctgtcctgggaatgctacagggtacagcccatttaagctcctgtatagacgctcctttttattaggccccagtctcattcgacaccagaccaacttagactgtgccccaaaaaatacttgtcatccctactatcttctgtctaatcatactcctattcaccattctcaactactcatacatgccctgctcttgtttacacggccggtttacactgtttttccaagccatcacagctgatatctcttggtgctatccccaaactgccactcttaactcttgaagtaaataaataatctttgctggcaggactatgctgaatctccttaggcactctctaatcagatatcctgagtcatcccaattcttagaccttttatacctgtttttctccttctgttattccatttagtttttcaattcatacaaaaccgtatccaggccatcatcaatcattctatacgacaaacgtttcttctaacatccccacaatatcacccctcaccacaagacctcccttcagcttaatctctcccactctaggttcccacgccgcccctaatcccgcttgaagcagccctgagaaacatcgcccgttctctctccataccaccccccaaaaatgttcgccgccccaacacttcaacactattttgttttatttttcttattaatataagaaggcaggaatgtcaggcctctgagcccaagccaaaccatcgcatcccctgtgacctgcacgtatacgcccagatggcctgaagtaactaaagaatcacaaaagaagtgaatatgccctgccccaccttaactgatgacattccaccacaaaagaagtgtaaatggccggtccttgccttaactgatgacattaccttgtgaaagtccttttcctggctcatcctggctcaagaagctcccccactgagcaccttgcgacccccactcctacccaccagagaacaaaccccctttgactgtaattttcctttacctacccaaatcctataaaacggccccacccttatctccctttgctgactctcttttcggactcagcccgcctgcacccatgtgaaataaacagccatgttgctcatacaaagcctgtttggtggtctcttcacacggacgcgcatgaaatgggctacatggagaaaccccatctctacaaaaaatacaaaattagttgagcatggtggcacagtcccagctactcgtgaggctgaggtgggagcatcacctgagcccagtaagtcaaggttgcagtgagctgtgatcgcaccactgcacttcagccttggcaacagagtgagaccgtgtctaaacaaacaaaaacaaaacaaaaaaacacccaaaaacagaaagggcaaatttgcccttgttcacttggccaaggtcacacagccatgaggtacaggggcaaacaatggacttgggccacactaatcgcagccgtcacccctactctgtcacatacaggcatctgtgtaaaaataaaataaaattacaattacaaaaataaagtagggccaggtgcgatggctcatgcctgtaaccccagcactttgggaggccgaggcgggtggatcacaaggtcaggagttcaagaccaccctggccaatatggtgaagccccgtctctactaaaaacacaaaaaaattagccgggtgtggtggcgggcacctgtaatcccagctactcaggaggctgaggcaggagaatcacttgaacccagaaggcagaggttgcagtgagccaagatcgtgccactgcactccagcctgggcgacacagtgagactctgtctcaaataagtaaataaataaaataaaatcaaaatagacctaccatttgatgcagcaatcccactcctgggtgtctacccagcggaaaagaagtcattatacagaaaagatacttgcacacacatgttcattgccacaatttgtaattgcaaaaatatggaaccagcccaaatgcccatcaatcaacgagtggataaagaaaatgtggtatatatatatatatatatgccatggaatactattcagccataaagaggaacaaaataatggcattcacagcaacctgggtggaatccgaggctattattttcagtgaagtaactcaggaatagaaaaccaaacatcacatgttgttactcataagtgggagctaagctatgaggtcgcaaaggcataagaatgatacattgaactctggggacttggggaaaaggtgggagtaggggtgatggataaaagagtacacatttggcatagcgtgccctgctcgggtgatggatgcaccaaaatctcagaaaacaccactaaataacttattaatgtaaccaaacaccacttgctccctaagactctattgaaataaaaaataagggccaggcatggtggctctgtggggaaaagcaagagagatcggattgttactgtatctgtatagaacgaagtagacataggagactccattttgttctgtactaagacaaattcttctgccttgagatgctgttaatctatgcccttacccccaaccccatgctctctgaaacatgtgctgtgtccactcagggttaaatggattaagggcggtgcaggatgtgctttgttaaacagacgcttgaaggcagcatgctccttaagagtcatcaccactccctaatctcaagtacccagggacacaaacactgcggaaggccgcagggacctctgcctaggaaagccaggtattgtccaaggtttctccccatgtgatagtctgaaatatggcctcatgggaagggaaagacctgaccgtctcccagcccgacacccgtaaagggtctgtgctgaggaggattagtaaaagaggaaggcatgcctctttgctgttgagacaagaggaaggcatccgtctcctgcccgtccctgggcaatggaatgtctcggtgtaaaacctgattgtatgttccatctactgagataggggaaaaccgccttagggctggaggtgggacatgcgggcagcaatactgctccgtaaggcattgagatgtttatgtgtatgcatatctaaagcacagcacttaattctttaccttgtctgtgatacagagacctttgttaacgtgtttatctgctgaccttctctccactattatcctatgaccctgccacatccccctctctgagaaacaccccaaaatgatcaataaatactaagggaactcagaggccgggggatcctccgtatgctgaacgctggtcccctgggcccccttatttctttctctatactttgtctctgtgtctttttcttttccaagtctcttgttccacctaacgagaaacacccacaggtgtggaggggcaacccaccccttcatgctcacgcctgtaatcccagcactttgggaggccgaggtaggcggattacctgaggtcaggagtttgagaccagcctgaccagcatggagaaaccccgtctctactgaaaatacaaaattagctgggtgtggtggcgcatgcctgtaatcccagctactaggaaggctgaggcaggagaatcacttcaacctgggaggcagagggagtggtgagccgagatcgcgccattgcactcgagcctgggcaacaagagtaaaactctgtttaaaaaaaaaaaaaaattaaggccgggtgcggtggctcacgcctgtaattccagcactttgggaggccgagacgggcagattacctgaggtcaggagtttgagaccagcctggccaacatggtgaaaccctgtctctattaaaaatacaaaaattagcccggcgtggtggtgggtgcctgtaatcccagctactcgggaggctgaggcaggaggattacttaagcccaggagacggaggttgtagtgagccgagatcgtgccactgcactccagcctgaccgacagagtgagactctgtctgaaaaaaaaaaaaaattatataaatcaatacaaataaagttaatgtattttatttaacccactatatccaaaacattattatttcatgcaatcaatatgaaaaggttattcacgaattacttttcattcttttgttcttgttgtttttaaattaattctttttttatttttatttttttttgagatggagtcttgttctgtcgcccaggctggagtgcagtggcgcgatgttggctcactgcaatctctgcctcccggaatctagcgattctcctgcctcagccttctgagtagctgggattacaggtgtgcgtcaccatgcctggctaatttgttgtgcatttttagtagagatggggttttgccatgctggtcaggctggtctcgaactcctgacctcaggtgatccgcccgcctcagccttccaaagtgctgggattacaggcgtaaaccaccgtgcctggcctaaattaatactttaaattaattaaaatgcttttaaaaagtccagaacaggccgggagcggtggctcaagcctctaatcccagcactttgagaggccgagttgggcagatcacctgaggtcaggagttcgagcccagcctggccaacatggtgaaaccccgtctctactaaaaatacaaaaatcagctgggcttggtggtgcatgcctgcaatcctagctactcgggaggatgaggcaggagaatccctttaacctgggaggcagaggttgcagggagccgagattgtgccattgcactccagcctggacgacagagcaagacaacatctcaaaaaaaaaaaaaaaaaaaacaagaaagaaaaactaaaatggtaccatgttttgcgtttttattttttttattcttagttgtttttttttttttttttgagacatgatctcactctgtcacccaggctggagtacagtggtgcaatcatgactcactgaaacctcaaaactcctgggctccagccatcctcctgcctcagtctcctgagtagctggggtttcaggcacgtaccagcacatctggctaatttctttttttaatttttagtagagatgaggtttcactatgttgcccaggctggtctcaaactcccgggctcaagcaatcctccctccttggcctcccaaagtgctgagattacaggcgtgagcaactgtgcttggtccaaattggtattacgttttcaattcaggcttcagatagaaggtaccctagttttattgccaagaagagatataatttctataaaacaactctcctatctagctagttttaggaacactcctactggtcaaagtatataaaactaaggggaccagagttagctgtaacgaccttgggctccacatatgcctgtacttaagaaaattaatgaacattcttggaaggtggaatgcatcttttacacctgagcaaattgaggcttgggttacacagctctgcctggcgcatgtgatttattttctctctctttttgtttttaagacctagtcttgctctgttgcccagactggagtgcagtggcatgatctcagctcactgcaacctctgcctcccgggttcaagcaattctcctgcttcagcctcccgagtagctgggattacaggcgcccgccaccatgcctggctaatttttttgtatttttagtagagacggggtttcaccatgttggccaggttggtcttgaactcccaacctcagctgatccgccctcctcggcctcccaaagtgctgggattacaggcgtgagccaccgcacccggcctgggcaagtgatttctttctgcctaattgtctagtcattaaccggtaactgaaaatcacaaacaatttcaatcttaggactgattgcccagcagtcaattcatgcaagatacttttttttttaaattgaggcttccgtggatggtgaaaatcaaaattggaatgattttcatatggaacaatgaaaagcgcccctttctgagttttctagactgacctctgacctctgtttcggagggcccggctagggctggcctgggactgcagaggattttgttttatttcctgtggactaaattatgataggattttaggcaccagtagagggcgctgagacacaggtgggcgagcagaagacaggctgttcgaggggaagtaaacctaatcgcgttccctttaaactttgtaatgactcaccacggagtcaactgaggaagtaaaacttaataggaatagtctcagtgaacaatgccataaattgacacgcagccaagtgccaagttctgataacaaatcagtaagaaatgcaagttaaaggaatgccattgttcccttagggggaaaaaaacctcttctttgttaaagccagtgatgaccagcagagggtaaagccagttcagaaggtcaaccggcagttttagaaattaatatggtctcacgcatgaatattcttacagtaattctacttgggtgattcaactctgacaaaaatagcagagatgttttctattatttatttaatttacttacctttttgagacaaagtctcgctctgtcgcccaggctggagtgtagtggcgaaatctgggctcaccgcaacgtctgcctcccgggttccagcgattctcctgcctcagcctcccgagtagctgggattataggcacctgccaccgcgcccagctgatttttgtatttttagtagagacgcggtttcaccatgttggccaggctggtctcgaaccgctgacctcaggtgatccacctgcctctgcctcctaaagtgctgggattacaggcaaaagccaccgtgtccagccacaaactgtcttatcaatggcaactgtctcctgatctgttggcctcacaataactgaataataaagcttacgttttgccaggcgcagtggctcacgcctgtaatcccagcactctgggaggccgaggcaggagtatcacctgacgtcaggagttcgagaccagtctggccaacatagtgaaaccccggctctactaaaaatacaaaaattcgccgggtgtggtggcaggcgcctgtaatcccagctatacaggaggccaaggcaggagaatcgcttgaacccgggaggtagaggttgcagtgagcaaagattgcgccactgtactccagcctgggtgacagagctagaccctgtctcaaaaaacaaacaaacatacaaccccaccccccaaaagaccctacatcttaaaacaagaggcaaaattgccctccgttgagaaccactgttctagacttaatctgttagagtcatttatttattttatgcacagaataactttgcaaagaggaatgactttttatttgttccagattctaaaataatctatgcagtcttccgtgcaggttgagatacttaaaactctatcggcaaaggccgggtgtggtggctcatacctgtaatcccagcactttgggaggctgagatgggcggatcacgaggtcaggagatcgagaccatcctggctaacacagtgaaacccggtctccactaaaaatacaaaaaattagcctaggaggcagagcttgcagtgagcttgcagatcatgccactgcactccagcctgggtgacagagtgagattccatctcaaaacaaaacaaaacaaaacaaaaactatcggcaaagtcacagccatggctaattatcatacgtttgttcagcaaattcaccttctttttgcaaacataatttacaccgtttaatcgggaattttacacaaaaaaaaagattctagaaaacatagctgtccataactgtcatggtttccaggttgcaagttcataatcatttgaattattcaaatgagtctctaaatgctacaaaaataatgtcttctacaatgacaagttatggaataaatatatagttgatcctaatttcaggacacttggtatgtaaatatttgctcacgtttttctttgatacgtacacaaagactaatgagtaaacctgtgctcacttatgtcatagctgcttgaaggtttttgttttgttttgttttgttttttttgagaccgagtcttgctgtgtcacccaggctggagtgcagtggcatgatctcgggtcactgcaagctccgcctcctgggttcacaccattctcttgcctcagcctcccgagtagctgggactacaggtgcccgccaccacgcctggcttttgtgtgtgtgtgtgtgtgtgtgtgtgtgtgtgtgtgtgtgtgtgtgttaaaagagacggggtttcaccatgttactcaggatggtctcgatctcctgacctcgtgatctgcccaccttggcctcccaaagtgctgggattacaggtgtgagccaccgtgcccagccgaagttttgttttttgtgtttttttttaatttaagcaaacatatggtttttgttttttatttatttgtttttgagacagggtcttgctctgttgtccaggctggagggcagtggcaagatcacagttcactgcagcctcaaccttccaggttcaagcaatcctcccacttcaaccccccagctggctggaattacaggtgcacaccactatgcccaactaatctttgtatctttttgtagagacggggtcttactatgttgcccaggctgaaatatatgtattttaaggaaaggatgaagtaaatagtattttagtatataaataagagttgagtatcctttatccaaaatgcttggggccagaagcgtttcggatttctgatttttcagattttggaataattgcatataaccacaacaaccaacatttactgagcaccacgtactgtgtgtcaggcaatgatctgagccctttacatgcattaagttacgtaatcactcaacaacccacgaggtgtgtattgtcatcagtttcggtccacaaaggggaagcagagcggagaggaaacctgcgcaggagtgcgcccaataccttttgctgtgtaacaagccttcccctcctgtgaaagggccctatgtgcaaagcagcccccaaatacacatggagttaagaaactgaagaatgaggcaaatccaggttatcaatataaagtttcattttcttcttctttatttgagatggagtcttgccctgacgcctgggctggagtgcaatggtgcgatctcggctcactgcaacctccacctcccgggttcaagagattcttctgcctcagactcctgagtagctgggattacaggcgcccaccaccacgcccagctaatttttgtatttttagtagagatggggtttcgccatgttggccaggctggtctcgaactcctgacctcaggtgatccgccccgcctcggcctcccaaagtgctgggattataggcatgagccacggtgcccagcccctccctcctttccttccttccttccttcctaccttccttccctccctccctcccttctttctctctttcttctttttgtggagaaggagtcctgctcttttgcccaggctggagtgcaatggcgcgatcttggctcactgcaacctccacctgccaggtttggcgattctcctgcctcagcctcccgagtagctgggaccacaggcacccaccatcacggcacggccaactaatttttgtatttttagtagagatggggtttcaccatatcggtcaggctgggtctggaaatcctgaccttgtgatccgcccgcctcggcctcccaaagtgctgggattgcaggcgtgagccactgcgcccgcctagttcctgttctgaagtttttaataaactttcactaatgctctaaagcttgccttggtctctcctgccttattcccccagtggaattctttcttctgaagaggcaaaaatggaagttgctgcagactcatacgcattctccgctgctaacatactttggtgctctgtgactcagatactttccctactgacattcaagtacaataaataaaataaaataaaataaaagaatggtaggtctcatccgaaggctctaggagaaaatcagattaaaaaaagaaagaggccgggcgcggtggctcacgcctgtaatcctgtaatcactttgggaggccgaggcgggcagatcacgaggtcaggagatcgagaccatcctggctaacacagtgaaaccccgtctctactaaaaatacaaaaaaattagccgggcgcggtggcgggcacgtgtagtcccagctaccgggaggctgaggcaggagaatggcgtgaacccgggaggcggagcttgcagtgaaccgagattgcaccactgcactccagcctgggtgacagagcgagactccgtctcaaaaaataataataataaataaataaatagaaaaaagaaaaaataggccgggtgtggtggctcacacctataaccccagcactttgggaggccaaggcagtcagatcacttgaggccaggcgttcaagaccagcctggcaaacatggtaagaccctctgctaaaaatttagccagacatggtggcattcacctgtaatcccagctacttgggaggctgaggccccaaatcgcaggaggtggaggttgcagtgagccgagatcgtgccactgcacttcagcttgggcaacagagccagaccctacctaaaaaaaaaaaaaagttgatattctatgtataatatactatattcttacaataaaggaagctagagaaaagaaaatgttatcaagaaaatcagtgtgcggccgggcacagtggctcacgcctgtaatctcagaactttgggaggccgaggtgggtggatcacgaggtcaggagttcgagaccagcccttatcaacatggtaaaaccccatttctaataaaaatacaaaaattagctgggcctggtggcacgcgcctgtaatcccagctactcaggaggctgaggcaggagaatcgcttgaacctgggaggtggagtttgcagtgagctgagattgcgccactgcactccagcctgggccacagagtgacactccatctcaaaaaaaaaaaaaaaaaaaagaaagaaaatcataagaaggagaaagtagtatattcactgttcattaagtataagtggatcatcataaaggtgttcatcttcatcatcttcaggttgagtaggctgaggaggaagaggaagaggaaggctgtctccgggtggcagaggaggaagaaaatccctggataagtggacccacgcagttcggacccgtgttgttcaaggatcaactgtatacacgcttatatttctcaaaaacaccctatgagttcagagcttgccagatgtagaggacctcacagttgacaacctgagtgacagctgtcaactcatgtgtcctatgtctccccggtatttatggagagcccagctgggctccataacccagtccttggggatctgtttcccaaatgcctctctccaaacgttgccggctgccagatctcatgttttactcctcttcccctcgttcactctcctccagcacagcgttcattttactctttttagaacaggcaaaacacactcccacctccaggcatccggatctgctattccctccaccagagatgctctccttggaggcatgcgggccccacatcaagcactgtctctggagaggctttctctcgtcacctctcctagaattgcattggttactcctgctctcatgcccagctttttttctttatcacacacgtcactgtctgacatagtgtgacatgtctgtgtgttcctgtgggtaattattggtcttcccttaaagtgcaggaatgccatgaggacagggactttttttgtttttgttttaagacagggtctgtctctatcacccaggctggagggcagtgatgtgatcactgctcactgcagccttaacttccctgggttcaagcaattctcccatctcaacctcccgagtagctgggaccacaggcacatgccatcatgcccggctaatgtttgtatcttttttttgtagagacagggtcttgtcatgttggccaggctggtttcgaactcctggcttcaggtgaaccactgcctcggcctcccaaagtgctgggattacaggcatgagtcaccatgtctggctaaggggactttgttctttttttttttttttccggagacagtctcactctgtcacccaggctggagcgtgcagtgctgtgatctcggctcactgcaaccctctgcctcccgggttcaagcgattctcccgcttcagcctcccgagtagctgggactacaggcgtgcaccaccacactcagctcagtttttgtattgttagtagagacgggggttttgccatgttgcccgggctggtcttgaacacctgggctcaagtgatcctcccacctcggcctcccaaaatgctgggattacaggtatgagccaccacgcccggcctagaggactttattttcttcatggctgtatctgcagtgcccgtctgtaacagggcacaatgcactctaggatacttgccgagtgagggaatttcccattagctagtgtagcttcatttctcctgctgcagcccatgcaagaccaccagcatctttcccaaggaccctcgtcttctgtaccctgttcacttgacatcctcatcaagttgatatctttccgccacccagcaagattcttttatttatttatttattatttattatttttttttgaggcggagtctcgctctgtcgcccaggctggagtgcagtggtgcgatctcggctcactgcaagctccgcctcccgggttcacgccattctcctgcctcagcctcccgagtagctgggactacaggcgcccaccaccacgcccagctaatttttttgtatctttagtggagacggggtttcaccatgttagccaggatggtctcgatctcctgacctcatgatccgcccacctcggcctcccaaagtgctggccatcgcgcccggcctaagattcttttaaaaacagaaaccagattgtgtcatttccaatcctaacaacccctaattgcttccttttccactttgaacaaaagccagcttctttacggtgtcctaaaacgccttccatgatctggatcctgttagccttggctgctttccttcctacctccaggttcctcagctctccctgtctgatccaccccattagccgctgcgctgtttttcatacaccagaaaggatgcctttactcagggctcttacgctaacccttccctgtgttgtaacatccaggcttccttaggatctccaggtagcccctcctcctcattctgtagttctcagctgagacattacaaccgcagcttcctcaaaaaattaaaaatagaaacgtcatgtgatccagcaatcccactgctgggtacgtttccaaaggaaatgaaatcagtatgtggaagagacgcctgcactcccgtgtttatgggagtactgttcccagtcgccaagatgtggaatccacctaggtgtccaccaatggatgaacgcaccaagaaaatggggtgtgtacgcacaatggaatactaggcagccttaaaaaagaaggaaatcctggcagggcgtggtggctcatgcctgtaatcccagcactttgggaggccgagatgggcggatcatgatgtcaggaattcgagaccagcctggccaacatagtgaaaccctgtctctactaaaaatacaaaagttagccaggcatggtggcgcacgcctgcagtcccagctactcaggaggctgaggcaggagaatcgcttgaacccgggaggcggaggttgtggtgagctgagatcacaccactaccctccagcctgggtgacagagctaggctccatcttaaaaaaaaaaaaaaaaaaagaagaaggatatcctgtcatttggaacagcatggatgaacctgaggacatacgttaaataaagtcagccaagcacagaaagacatatactgcatgatggcactcatatgtggaatctgaaaatgtggcactcatagaagtaaagagtagaatgggggttcccaggggctggagggagtccgggggtggaggaggaagagagggaatgggaagttcttttttgagacggagtttcgctcttgttgcccaggctggagtgcaatggcatgatctcagatcaccgcaacctccgtctcccgggttcaagccattctcctgcctcagcctcccaagtagctgggattacaggcacgcaccaccatgcctggctaatttttgtatttttagtagtgattcaccatgttggccaggctggtctcgaactcccaacctcaggtgatcctcctgccttggcctcccaaagtgctgggattacacatgttagccactgtgccaatgggaagttcttagtcagagaatacaatgtttcaggctaggcacagtggctcacacctgtaatcccagcactttgggaggccgaggtgggtggatcacgaggtcaggagttcaagaccagcctgaccaacatggtgaaaccccatctgtactaaaaaaaataaaaataaaaaaattagctgggcgtggtgctgcgagcctgtaatcccagctactcgggaggctgaggcaggagaatcacttgaacctgggagacagaggttgcagtgagccgagatcgtgccattgcactccagcctgggcaatagagtgggactctgtctcaaaaaaaaaaaaaaaaaaaaaaaaagaaccatattcttgaaaaccactgacaatagattttaagtgctcacaccataaagaaataagtatgtgaggcaatgcacgtgttcaacagcttgatttagccactccacaatgtatacatatagcaatacattatgttgtacaccataaatacatacacttttctttttcttttttttttttttgagacagagtcttgctctgtcgacaggctggagtgcagtggcgccatctcggctcactgcatcctccacctcccgggttcaagcggttctcctgtctcagcctgccaagtagctgggattacaggtgtgtgccaccacacctggctaattttttgtattttagtagagacgggtttcaccgtgttggcagggtggtcttgatctcttgacctcgtgatctacctgcctcagcctcccaaagtgctaggattacaggcatgagccaccgagcccggccaacacatacacttttcatttgtctatttaaaaaaatcactactggccaggcgcggtggctcttgcctgtaatcccagcactgtgggaggctgaggcgggcggatcacttgatgtcaggagtttgagatcagcctggccaacatggtgaaaccccgtctctactaaaaatataaaaattaggtgggcatggtgggcgcctgtagtcccagctactcgggaggctgaggcaggagaatcgcttgaacccaggaagcggaggctggcagtgagccaagatcgcgccactgcactccattctgggcaacagagcaagaatctgtctcaaaaaaaaaaaaaggaaagaaaaaagaaatccttgccaatcctgatatcccagagatgtttcccaatgccttgctcttgaatatttatagttttatctttcacacttagacatgtgaaccatctagaaatgtatttggggtacggtgtaaggtcggggtcctggaccgaatacagctccacaaaaatgtctgttctcgactgcaaaaaagcaatgtgactttgtgcacagatcaagtgcatctgtttctgaaatctgtagtgttctgtgtcatcagcctgcatttccatggttgcgacaataccacattatttgcctcatttcctaccgcagttcctcaatcactctgaattcagcggcactagcctcattgctctcggatgagcacacctattgtgtaccactcagggcgcctgtgtctggactggcagcctttcttagatgctttgggtggtggttctgtcttatccttcagccagcagctcagagtcctcccctcaaaaggcctttccctgaccactccatctaaagtagctcaccccagcctcctatatctttttttttttaataatgcaacagagaaggtgatataggtgcattgacaggccttcttttattagcttgagccattattattattattattatctgagatggagtcttgctctgtcacccaggctggagtgcagtggcacgatctcggctcactgcaacctctgcctcccagggtcaagcaattctcctgcctcagcctcctgagtagctgggattacaggcgtacaccaccatgcccgactaatttttgtagttttagtagagatggggcttcaccatgttggtcagactggtctcgaactcctgacctcgtgatctgcctgcctcagcctcccaaagtgatgggattacaggcgtgagccaccgtgcccagccttcttcttcttcttcttcttcttcttatcatcatcattttgagatggagtctctacctgtcacccaggctggattgcagtggggcgatcttggctcactgcaacctccgcctcccaggttcaagcaattcccctgcctcagcctcctgagtagctgggacttgtattttttagtagagatggggtttccccatgttgcccaggctggtctcaactcctgacctcaggtgatccacctgcctcggcctcccacagtgctgggatgacaggcatgagccaccacgcccagccaccagtcccctatatcttatgttctggtacattttgctatacaaaaacaacttatgtgtgtgtttgctgactcattgtctctctcttgcatgtgtgaacagagcagcagcaataatgtttgcatgtcttgttcactggccatgtcccctgggcatagcatacggtagggaattcactttggatgaagaaaaatgatcctcttgcatccattcaggatgaatgcattctaccctcagagtcctctagggggcacccgcacatgaatgcgcccctgcagggcacagttcttgagttgtttttgtttaactggcctgcacctgttattttgtttgtgtgtgtgtttgggtttcttcttcttcttcttttttttttttttgagacggagttttgctcttgttgcccaggctggggtgcaatggcgcgatctcagctcacagcaacctccgcctcctgggttcaagtgattctcctgcctcagcctcctgagttgctgggattacaggcatgtgccaccacacccagctaattctgtatttttagtagagatggagtttctccatgttggtcaggctggtctcgaactcccgacctcaggtgatccgcccacctcggcctcccaaagtgctgggattacaggcatgagccactgcaaccagtctttttttttttttttttttttttttttttttaagatggggtcttgctcagtttgtccaggctggagtgtagcagtgcagtcacagctcactgcagcctcgcactcctgggctcaagtgagcctcctgcctcagcctcctgagtagctggaactataggcacaaccaccttgcctggctaattaaaaaaaaaattttttttttaaagagtcagggtcttgctatattggccaagctgatctcaaattcctgacctcaagtgattctcccacctcagcctcccaaagtgttgggattccaggcatgagccaccatgcaccaggtctggcctacagcttttaactacacatttagaaagagaaaccacaagtggtaaaagcctgggttctgccctagattacccgaaatgagctatttttatagaagcctcctgtgtgcaggggctcatgctaggccccaagggcaggcagaggttgttttttgttttttgttttttaatttgtttctttttgagacagggtctcactctgtcgcccaggctggatgctgtggtgcaatctcagacctgcaacctctgtctcccaggttcaaggaattctcctgccttggcctccggagtagctaggacaacaggcacgcaccaccacgcccagctaatttttgtatttttagtagagacggggtttcaccatgttggccaggatggttttgaactcctgacctcagatgatctgcccgcctcagcctcccaaagtgttgggattacaggcgtgagccaccgcgcctggcctaaggcagaggttgttgactggtctcagttgctgcttggaagggccccagtctcctgcagggagggagggaggatcccactatggctcccagaactttgcttcccagcaagaggcactaaatcaatcccatgcttgaggatggtgggccctgagagaaatgaatcttggcctccaagtgttcagactgtgtgggggacacctgctatttacatttgtgaaatggggctggtgaccttggctcagcgatgggctccatctcatctcctcctggaagcttgatggaggaaaagcatctacagccatttgttatcactgggctccttgcctgaaagattataaatacttcgttaaaatacatacatccatagtgatgtgttttgacttggtaatagatttcagggtagacgcaagcctcctcagccacccctgttttccagttgcccagagttcctccctttctgtttttactgatttcttctgtatctttctggaaatatccattgcatatatatacacacacagatatatatatatatgcatgtataaatgtgtgtgtatatatatatgtgtgtgtgtgccgatataagacattgttttaagtattttacgtgcattgagtcatgtaatataaatatacttttatattgctaatacattaatatgtttaaaataagaaaattatacaggccagatgcagtagttcacacctataataccagagctttgagaggtcgaggcaggaggatcacttgaggccaggagttcgagaccagcttgaacaacatagggagacccctgtgtctacaaaatataaaataaaatataaaaaataaaacccggctaggcacagtggcttacacctgtaatcccagcactttgggaggctgaggtgggcggatcacaaggtcaggagtccaagaccagcctggccaacatagtgaaaccctgtctctactaaaaatacaaaaaaaaaaaaattagccgggcatggtggtaggcacctgtgatcccagctactcaggaggctgaggcaaagagaatcgcttgaacctgggaggtggcggttgcagtgagccgagatcacgccactgcactccagcctgggtgacagtgtgagactccatctcaaaaaatgaaaaataaaaataaataaattaagcccgcctggcgtggtggctcatgcctataatcctagcactttaggaggccgaggcaggcagatcacgagttcaggagttcgagaccagcctggccaacgtagtgaaaccctgtctctactaaaaatacaaaaaattagctgggcgtggcagcatgcgcctgtactccaagcttcttgggaggctgaggcaggagaattgcttgaacctgggaggtggaggttgctgtgagagccgagattgtgccactgcactccagtctgggtgacagggtgagactctgtctctaataaataaataaataagtaaaacaaaccctagccagggagacagctgtggtcccagctactcaggaggctgaggtaggaggatctctcagacttaagaggtcaaggctgcagtgagtcgtgatcataccactgcactctagcctggcaacagggtgagaccctgtaataaaatacataaacagtgatgtgttttgacttggtaatatatttccgggtagactgtaagcttctcatccatcccagttttcccattttccagcgttcctccccttctgttcttattgatgtcttctgtatctttttggaaatatccatggcatatatatatatatatatatatatatatacacacacacacacacacacacacacacacatatacacacatatacatgtgtgaatatacatgtgtgaatatatatgtactgatacaaggcattattctaagaattttacttttatttttatttttatttttttgagacagagtctcactctgttgcccaggctggactgcagtggctgaggctcactgcaacttccctctcccaggttcaggcaattcttgtgcctcagcctcctgagtagttgggattacaggcaccagccaccacacccagctaaattttgtatttttagtagagaagggatttcactatgttggccaggctggtcttgaactcctggcctcaggtgatccatctgcctcagcctcccaaagtgctgggattacaggcatgagccaccgcacccagcctattctaagaattttatatgcattgaatcatgtaatatagatataatttttttttttgagactgagtttcattctttgtccaggctgcaatgcaatggcatgatctcagctcactgcaacctctgcctcccaggttcaagcaattctcctgcctcagcttcccaagtagctgggattacaggcgcctccaccacgcccggctaatttattgtatttttggtagagatggggtttcaccatgttggcaaggctggtctcaaactgctgatctcaggtgatcccctgccttggcctcccaaagtgttgagattacaggcatgagccaccatgcccagcctgatataattttataaagctaatacattaatatgtctattttttattttttatttttttgagatggagttttgctcttgttgcccaggctggagtgcaatggtgcgatctcggctcatcacaacctctgcctcccaggttcaagcgattctcctgcctcagcctcctgagtagctagaattacaggcatgcaccaccaccccagctaattttgtatttttagtagagatggggtttctccatgttggtcaggccggtctcgaactcccgacctcaggtgatatgctggccttggcctcccaaagggctgggattacaggcgtgagccactgcgcccagccaatatgtttaaaatagaaaaattatacaggtcgggtgccaaatttttttgtagagacagggtctcactatgttgcccaggctggtcttgaactattggcttcaagcagtcctcctgctttggcttcccaaagtgctgggattacaggcatgagctgccctgtccggcaggctccttttaacaatcagctctcatgggaacaaatagagcaagaattcactcattaccctgagaagagcgccaagctcttcatgcaggatgggcctccacgacgcaaacacctcccacaaggccacaggcctccaacattcagaataaattttcttttttcttgagacagagtctcactctcttgcccaggctggagtgcagtggcgcaatctcggctcactgcaacctccacctcccaggctcaagcgattctcctgcctcagcctcctgagatcacaggcgctcgccaccatgcccggctaatttttgtatttttagtagagaggggatttcaccatggtggtcagtctggtctcaaactcctgaccgcaggtgatccacccaccctggcctcccaaagtgctgagattacaggtgtgagccaccgtgcccagcccaggatcaattttcaacatgagatttggaggggacaaataggtaaaccatataaatatccttatttttatgttttctcacctgtaagattgcatcctcatgcatcattgttcacttaggacttcctcctagaaagcttttcatttaggtaaacagagcttcctcatccttttaagaagatacagacatgtttgcattattgaatctgccatcgttcatctcaccagtcccctataagatggagtcttgatctatttccagtcttagaagtacattcagcaggggagttttacaaatcaaatagatttccttcgtcgttcccccaaaaatgcagcctacgtcttcaaaaccgaagacttcagtctattttgcttaaggatgacaaaagtcaccatctgttaatccaatctgcatcaggagaaaaacgaaaatcatctcatgcgcatgaaacctcctcttgggctatgtgaaggggaattcctgagggtctcttgccatgcagcagggagagcctctggctgtggtggctcttgtttggatccaagaagcagaggaggaatgtgttgaaggactttgagtaaaagcaaaagagccgggcgcggtggctcacgcctataatcccagcactttgggaggccgaggcgggcggatcacgaggtcaggagatcgagaccatcctggctaacatggtgaaaccccgtctctactaaaaatacaaaaaattagccaggcgtggtggcaggtgcctgtagtcccagctatttgggaggctgaggcaggagaatggcctgaacccgggaggcagagcttgcagtgagcagagatagagccactgcactccagcctgggtgacagcgagactccctctcaaaaaaaaaaaaaaaagcagaagagccacgacctggctcatgcctataatcccagcactcttgcgaggctgagacaggtggatcatctcaggtcaggagtttgagaccagcctggccaacatggtaaaaccccatctctactaaaaatacaaaaaaaaaattagccgggcatggtggtgcatgcctgtaatcccagctactcgggaggctgaggaaggagaatttcttgaacccaggaggcagaggttgcagtaaactgagatcgtgccactacactccagcctgggtgacagagcaagactctgtctaaaaaaaaagcaaaggatacatggaaaggctacggaatccggctcaggaatgtggcaggaggccaagaatagacagcagcaagaatgttcctaatatcagatgcagccacaccccggtggggaagccaccattaccaccaccaccactgggcactgccctcctgacattgactagtgacacctttgcccttgccactgtactttaattttctttctttctttttttgagacagagtctcaccctgttgcccaggcttcagtgcagtggtgcgatcatagctcactgcagaattgaacccacgggctaaagagatcctcctatctcagcctcccaagtagctgggaccacagttgtacatgaccacacccagctagtcagtgtttttctaaaaaaaaaattcatagagccagccgaggtggctcatgcctgtaatcccagcactttgggaggccgaggcaggcggatcacgaggtcaggagtttgagaccagcctggccaaaccctgtctctactaaaaatacaaaaaaattagctgggcatggtggccagagcctgtaatcccagctactcaggaggctgagacaggagaatcgtttgaactcgggaggcataggttgcagtgagctgagatcacaccactatactccagcctgggtgacagagcaagactccatctcaaaaaaaaaaaaaaaacccaaaaccaaaaaacatagatactaaattttgtcaaatattcttttagcatatataagatgatcatactgattttttttttactttgttaatatgataaagctcattaatggtttttgaatattagccattctgggctgggcacagtggcttacgggtggttttgggaaactgaggcaggaaaattgcttgagcccgggagttcaagaccagcctgggcaacatggcaaaaccctgtctttactaaaaacaccatgctgggcatagtggtacacacctgtattcccagctactcagaaggctgtggagggaggatcgcttgaggccgggaggttgaggctgtagtgagctgtgatcacgccactgtgatcacgcctctgcactccagcctaggagacccagagagactctgtctcaaaaaaaaaaagaaaaagaaaaagaaaaagaaaaaaaagccattttggcatttctggaataaaccccagttggtcacaatgtatttttttttactctaccgctggagtctgaatgctaatacaggctgacacactccaaaacccagagctctattctgagcctaaggagtccacacgaaatgaaggctgtgctaccgtgccatagccacaaagagcacttgaaacctggctagtgagactgagaaaccgaattttaaattttattattattattattatttattgagacggagtttcgctctggttgcccaggctggagtgcaatggcgcgatcttggctcactgcaacctctgcctcccgggttcaagcgattctcctgccttagcctcctgagtagctgggattacaggcaggcatcaccacgcccaggtaattttgtatttttagtagagccgcggtttctccatgttggtcaggctggtctcacactcccgacctcaggtgatccgcccgcctcggcctctcaatgtgctgggattacaggcgtaaggcccccgcccggtctattattattattattattattattattattattattgagacagagtctcgctctgtcgcctaggctggagtgcagtggcgtgatctctgctcactgcaatctctgcctcctgggttcaagtgattctcccacctcagcctcctgagtagctgggactacaggcatgagcctccacatctggttaatttttgtatttttattagagatggggtttcattatgttggccaggctggtctcgaactcctgacctcaagagatctgcccgcctcagcctcccaaagtgctgggattacaggcatgagccaccgcgcccagccaatagagtttatttttaaaagcatttttaggttcacataaaaattgagcagaaggtacagagatttccctgtccccacacatgcacagcctccccaactaccaccatccccagctagtggtagatttgttacagtggatgaacctccgctgatttgacatgtcatcttcacccagggtccacggtttacactggggttcacttggtgtcatagaatctataggttcatacaaatgtataataatcagtatttaccactatggtgtcataatacagtttcattctcctaaaatatctcttactctgcctattcattgcaaccccaactctcctgacttttttcttattttttttttaaactttttaaaaatgttgctactacttctttgggagactgaggcaggtggatcgcttgaactcaggagttcaagacccgtcttcgtaactgagtgagaaccagtctctaccaaaaaaaaaaaaaaaaaaaaaattagcctggcatggtggcgagcacctgtagtcccagctactctggaggctgaggcaggaggattgcttgagctctggacgtcgaggctgcagtgagccgagatcacgccactgcactactccagcctgggcggcagagcgagaccctgtttcaaaaaaaaaaaaaaaaaggaagcagaaatgcattcacaggctttgctgctaggtggttattattttttgtttgtttgtttgttttttgagagagagtctcagtcactctgtcgcccaggctggaatgcagtggtgtgatctcaggtcactgcaaactctgactcccaggttcaagtaattcttctgcctcatcctcctgagtagctgggattacaggcatgcaccaccatacctggctaatttttgtatttttagtagagacagggtttcaccatgttggccaggctggtcttgaactcctggcctcaagtgatccgcctgcctcaacctcgcaaagtactgggataacaggcgtgaaccactgcacctggccaatcactactttgtgtgtccagaaaattttcttcctcctaaaaagaaatcttctacacttgtatcatccccatcccttgagtgtgggaggaacgtgttactttcttctaaccaatacggcatggcaaaggtggtgcttatatgttgtagaagatttcttgctagctgacacaccctagagtctctcatcactgactttgaaggagcatgcactgatgagttgatgagggttttttgtttgtttttttgtttttttttgagatggagtctcgctctgtctcccagcctggagtgcagtggtgcgatcttggctcactgcaagctccgtctcccaggttcacgccattcttctgcctcagcctcccaagtagctgggactacaggtgcccaccaccacgcccggctaattttttgtatttttagtagagacggggtttcaccgtgttagtcaggatggtctcgatctcctgacctcgtgatgtgcctgtctcagcctcccaaagtactgggattacaggcgtgagccactgtgcccggctgagttcttttttttttttttttttgagacagggttttactctgtcatccaggggctggagtgcagtggcgtgatctcggctcactccaacctctgcttcccaggctcaagtgattctccagcctcagtctccccagtagctgggactgcaggtaccaccaatacctggctaatttttgtatttttatagagatgtggttttgctatgttgcccaggctggtctcctgagctcaaaacaatctgccctccttagccttccaaagtgctggggttacaggtgtgagccaccgtgcccagcccctgatgagttctaaagtcacaaggaaacaaattctgcagcaagctgagtgaatttagaagcacgtcctttcccagcggagccttcagatcaaaactcagtgccgggccgggcgtggtggctcacgcctgtaatcccagcactttgggaagccaaggtgggcagatcacttgaggtcaggagttcaagaccagcctggccaatgtggtgaaaccctgtctctactaaacatatgaaaattagccggggtgatggcatgtacctgtaatcccagctactcaggagactgaggcaggagaatcgcttgaacctgtgaggcagaggttgcagcgagccgaaatcgtgctactgcactccaacctgggcgacaaggtgagactccatctcaaaaacaaacaaaccaacaaacaaaaaacacaaaaacaaacaaacaaacaaacaaacccaaaactcagtcctggccaataccttgattacagcctcacagagaacctggctaaactgtgctaagctccatagaaactgtgagataataaatgcacacatatatatgcatatatatgatatgtgtgtgtgtgtattttaaatccaacgaaatattctttgagtaggaacattgactatcaaaaagagaagaattgtaacagcaatagtaaggttatgagaagaatgtctttagagatgaaaaagaggaaaagaattgacggctgggcacggtggctcacgcctgtaatcccagcactttgggaggccgaggcaggtggatcacctgaggtcaggagtttgagaccagcctggctaacagagtgaaaccccatctctactaaaaatacaaaattagccggacgtggtggcccatgcctgtagtcccagctattcgggaggctgaggcaggagaattgcttgaacccaggaggcagaggttgcagtgagcagagatcgcaccactgcaccccagcctgggtgacagagtgagactccatcttaaaacataaataaataaataaaaagaaaagaattgacctgagatgaaaaaaacaacttatttgtttttagaggacagtcctagaaatgtagccaggtggctggacgcggtggctcatgcctgtaatcccagcactttgggaggccgaggcaggtgggtcacctgaggtggggagtttgagaccagcctgaccaacatggtgaaaaccccgcctctactaaaaatacaaaaaaatttagctgcgtgtggtggtgggtgcctgtaatcccagctactggggagactgaggcaggagaatcgcttgaacctgggaggcagaagttgcaatgagccaagaccacctctttgcactccagcctggatgacaagagcgagactccgtctcaaaaaaaagaaaagaaaaaacacacacattggtgtcagacgtgttgcgagtggaaaccacttcgtaatctttatcccaagtgaactctccccctaaaacctctattacagggaatgctatgatgccatgtggtagatcagatgaccactctgaggatctggatcagcctccttccctggcatcctcagggcttgctccataggttcaggagcaaagtggccgaggtggactacaccacctacgtcactgatgaatgcccacctagctggcagtagcaagtgctgatcccccagtgtggtacagtttcctaggaagaccaaaaagccaaatacctgggcccgtgaggattacactggagccctttcatcctgggctgggcagggagtttttcctccctcgagtaaacaactctgggcttgttatttgcttttcttgccctttgcacttctgccaacagcagcatctgtgtatgcactgaatggccctattcaccctcatgttaacccgcacagtattgcttctgatcaaggagctccatatattaggaagtcagtggggggcagtccatgtaccccattaccccaaagcagccagcctcatggaacagcacggcctgtttgagactgggttacagggccagtttggagtcatcatctttggggtcggggtgctgttacaggatgggtaaccactctgaaccaggggtacatgccagatgatcccagattacaaagacctgtgaactcaagagtgccatttctttcttttatttttctctctcttttttttttgagacggagttttgctcttgttacccaggctgaagtgcaatggcatgatctcagctcactgcaacctctgcctcctgggttcaagcgattctcctgcctcagcctcccaagtagctgggattacaggcacatgccaccccgcccggctaattttttgtatttttagtagagacggggtttcaccatgttggccaggctgatctcgaactcctgacctcaggtgatccacccacctcggcctccctcccaaagtgctggaattacagacatgagttgctgcatcggccaagagtgccatttcttaggaccacacccgatgactcactcttcaaatttttatttgttttgttgttattttttgttttgagacagagtttcgctcagtcacccaggctggagtgcagtggcaatcttggctcactgcaacctccacctcccgggttcaagccattctcctgcctcagcctctggagtagctgggattacaggcggcgccacaacgcctgattaatttttttgtatttttaatagagacggggtttcatcatgttggccacgctggtcttgaattcccgacctcaggtgatctgcctgccttggcctcccaaagtgctaggattacagaggtgagccaccgtgaccggccttcactcttcaaatgtttgcttcctgttcctgctaccctgaaccctgctgttgaggggttctagtgtctacaagggaaccgctgccaccacgaggaataacacagtaagttgtgtaagtggagaccacctctgggccgtttggggtaccttgagtgtgtcactatggggttaggcagtgactaatttaggcaggaaggggaaagatttgctgctacacttggggccaaggaggcctgtgaatagaacctagaggcgtcccaggggagtctccaactaacaccatgtcccgactccctatctgtccacagccctccctccttggacaaggacaaggcctgatctgggtgcactgagacctccctcccctatgcagggcccagagtgacaaagagggtctgtgtccccttccctttgcagaagcacatcaagcccgcacacaggctctaccttcctctacccaaccccctctccactcctgcagacccccgccttcctgcaggtccccctccggcccctccctgctccgtagggcacgtagacccggatccccagctcccggaccccttccgactgctcccttcgccactcgcgcggcttccactcctggactcggcctccacccctgggcttggcctcaaagcctcctcagttgtcggccctggaaggtgcccagcggcggcagcgccagacgcgccccgttagctcagcgtcgctgagcatccgcagccgccaccaggccccgcccagcggccgcagccagccaggccgcgcccgggacgactgcagagcgcggtgagtgaacgcggccagagggagggactcaggcgtcccaggtccccgccctgcccctccccgggggcccgacatcccgaccctcagctccctctttttcttttggctccggcagtccgttttagggccgcagagccgccttttaaaaacacaccctgcatcccttccctgccctggggcttcgggcccaccagccccttggatcccttcccctcttgcaggatccgtgaatccagagccccaagccccagccccagccccatcctcattaaaattctgagtccctccctccatccaggagtcaggaatgtaggccaaaaatatcgctgccttccagacccaggcggctaggcttgcaacacctgctcggaaaacccgagtctgagctttaatggttctattatgatgatcatgatgatttatttttaatagagcagagtctccttatgttgcccaggctggtctcgaactcctgggctcaagggatcctccctcctcagcctcccgaaatgctgggattacaggcgtgagccaccgcgcccaggcctgattgttcttttgagccaagaatctgggcctcagcctaggcatcctgtggagcccaggaatccgggcccccaactgctaccgcgctagctcccaggaattttgcccccaacacaccccacccctatccactgtgatatctgagacctgcgtccagcccgagtcccttaccctgcggcgcccggtgccagtgggtactaggggagcattttgccgccccttcaagtccttaaatacaggaatctagcctctgtttcttggggagacccatcagtcagggatcgtagcccagaaccacctaaagcccaggaatactgctctcaattctgctctccctcagggctccaagagacagagatcctagcccccccattgaactgaggggcctggtcccccaatccgctgcgacccaggtgtctaaggtttcatccggcaaggaaggggtgggggcggaacagaccaggaaggagggggtaggaagggagcggaagaaaggagtgaggtgagacgggggcggggacctgagctggggggctctgcactaaacaaaccctaaacatgcggggtttctatggtaacggtcttccctggcctacccgggagactcctctagggctgtgtcgaggagggcagcccccaggagtctccacgccgccagctgttgtgtcttcctgttttgtcaccacggcaaccgtgacctcagccctccaccctgctcactggggtggggcgggagctccacgctacttttactctggggggcgtggtctgctcttggccccgcctcggggcggggctgggatagcccagactcggggaagtccctgtccaccgccctagccggagctgcgccccgccccggccccgcccccgtcccgcccgcgctggctccccagccctccaaccccacccagccctcagacccttccagctgccgctgtcgtctttgcttcagccgcagtcgccactggctgcctgaggtgaggttgtggggaccccagagggcataagcaacagtctagggtctttatggccagagagaggaatgggctgggtctcagaatgtctgggtccctagaaagactggggctgggccaggattcttggggttctgcagaggagagggctgaggacctggactgtggaggtcatacgtctggaagagtggggaaggggacctggactccggggtctgagggaggaggggctgggggtctggactcccgggtccgaggcaggaggggctggggggtctggactcctgggtccgagggaggaggggctgagggcctggactcctgggtctgagggaggaggagctgggcctggactcctgagtctgagggaggaggggctgggtctgcgggagtagagagatggggactcgtaggtgccctagttggaggctggaatctggtacgtggaggtcctttaggaggggaagcgcttagggttaggtgtcctgggtttgggaatgagaatggaaggaattcagaattactgacccctccccatccaggggacagacagaatcggaactttgggctcctgaaaggccgagggaggggggtgttaagatccagccccgtgcttccgaagtgcagaaggagctgggaaaggaggagaagacagggctgcgtcccgcacctctgggtgccgagagccgaagctggggttccggggcccgattctcagcgtgagcgatgggtgtggcgtctggagtggacgagggaggacactgaggggctgggtgtggcccggagagtcgggtgcgctgcgaggaatcccggaggggtgtttcctcaccctccagggtctggctgcgcattcctgagctctgatctcgggcgatggctggaggccctaagggcggggtggacccctcccctcccctcccctcggcgcgcccccctcccctgcgcgcccccctccgcggctagcccaccttccgcgggggacagaatgagtgacgccctcgctcgtcctcctcccctgcttgggacggggcagtagcccgccttctagagcacgggacgctgggccagtcccgatttccttctccttcgagggtcctggaggggcgtgggggcaggcagtgtctggctccgggtggagcctcccaggtgctcccgcaagccccgaatggcgattagggaggccgtgggaggcgtagctgggcctcgggcctgacgccagcaccgcgtgcagtttccggcctggagcctgagcccctcagaggcccgggtccctgcccactccggtcttagagatgctcttgggggggctctcagcccatgtttatagggatccagaaatgcaggcctccaaccctgagagtcggggtccccaccccccggaaatccgggagagggcgggcagccccggaggcgggcgggggtccgggcaccgcctcctggtccctgacacattccagatgcctgggccgactcgaagcccttataaggcgcggagacaccggctctggctgggccgcccgcctccacagccgccgcccagggttctcccgccactgccgcccgcacccccgcccccgcggggttaagatcacacacgcgcccacgccggcccgcggggcgtgcactttcgctgggttccgtccgccgcagcccaaacagttaactgaacggggaggggagggggcggggcttacccggggtcaccgccagggccctgctgggttccacgccacgttcctgtctccgcagggcgttcgatccctagagggaggagcctgtccaaacggacgctaacggcctacctccccctcaggtgctcttacagcctgttccaagtgtggcttaatccgtctccaccaccagatctttctccgtggattcctctgctaagaccgctggtgagtaggcagcgggcctggactccggggtccgagggaggaggggctgggggcctggactccggggtccgagggaggaggggctgggggcctgggctcctcggtccgagggaggaggggctgggggcctgggggcctgggctcctgggtccgagggaggaggggctgggggcctgggctcctgggtccgagggaggaggggctgggggtctggactccggggtccgagggaggaggggctggggtctggactcctgggtccgaggaaggaggggctggggtctggactcctgggtccgaggaaggaggggctgggggcctgggctcctgggtccgagggaggaggggctggggtctggactcctgggtccgagggaggaggggctggggtctggactcctgggtccgagggaggaggggctgggggcctggactccggggtccgagggaggaggggctgggggcctggactccggggtccgagggaggaggggctggggtctggactcctgggtccgagggaggaggggctgggggcctgggctcctgggtctgagggaggaggggctgggggcctgggctcctgggtctgagggaggaggggctggggtctggactcgtgggtctgaaggaggaaggattaggtcctgggctcctagatcctgggagaaggaccaggaagcttgggctccaaggaatagggtcccagacactgaggtatctgaggaagaagcgagtccaggccctggctcctttgtctcagggagctgctgtcctgcgactgccacgaagaggttaaggcctgtgctactgccctgcaaagtgcctgaagctgaaaggaggaagttactttcctgtggctaggagaggccttgggtttagtcctgtggctgcgttgagacagtttacagcctaaggaaagaactgggcacctggtttctaagaggacgggcacttgattcctgggggccattaggacaaggaggtggaagctgtaggttttgcaaggactaaagaagcaaattggttttctggagtctggggcatctgggatccttcaggctaagggtccagggccagaggtctgaccccttataacaggacggtgatggccaggcgcagtggctcatgcctgtaatcccagcactttgggaggccaaggcgggcggatcacttgaggtcaggagtttgagaccagcctggccaacatggcgaaaccccatctctactgaaaatacaaaaattagccgagcatggtggcacacacctgtaatcccagctactcaggaggctgaggcaggagaatcgcttgaatccgggaggcggaggttgccgtgagtcaagatcgcaccattgcactgcagcctgggtgacagagcgactccatgtaaaaaaaacaacaaccaaaaaacaggattgtgaggcctagagagagttcagtggaagggcctggggttcctactggacagttggaaatctggggagctgagtttcccagaagctgggggaccagctggctgggttttggggagagaaggtggaggtagatggactcagtatgcaggagtgtggagggggaggctcaaactagcttttttgggttgcagtactccagtcctaaatctcaggtgggagttagactgagagtgaaggttgctaatctccaaggtggggggtagggagaggaggaggccgctaagagtttaggctccttgtcagaagggaggggagatctcttggttttccacggctgggatctctatgagaagatatcctttatcgggaggtcggagctcttattagatgtgggtccctgagagtggaagcctggggaggttgggccgtttagaggctgcaaatgtctaggtcactgttcgatggaagaaggaagtttgctcacagggtctggggtgcagagctctgaatactgaaagaaaaggaagttgagagatggggttttcagagcctgtggaagacaagcgttttgttctgacacttgggttgtggcaggaggcagaaggaggatgctttattttttatttattttatttatttttattattttattttattttttgagatggagtttcactcatgtcacccgggctggagtgcagtggcgcaatctcggctcactgcaacctccacctctagggttcaagcgattctcctgcctcagcctcccaagtagctgcgattacaagcgcccaccaccacacccagctgatttttgtatttttagtagagacggggtttcaccatgttggtcaggctggtcttgaacttctgacctcaagtgatctgccagcctcggcttccgaaagtgctgggattacaggcatgagccactgcgcccagattattttattttttttgaggcggagtgtggctctgtggctcaggctggagtgcaggggttctatcttggctcactgcaacctctgcctcctgggttcaagtgattctcctgcctcagtctcccgagtagctgggattgcaggtgcatgccaccacgcccagataatttttgtattattagtagagaccgagtgtcgccacgttggccaggctggtctccaactcctgacctcaagtgatccacccaccttggcctccgaagtgctgggattacaagtgtgagccaccacacccggcctatttgtaattaaaaaaaattttttttttttgagtcagggtctcactctgtctcccaggctggagtgcactggtgcatcacagctcactgcagccctgaccccacaggctcaagcaatcctcccacctcagcatcccgagtagctgggaccacacgcacacaccaccacacccagctaattaaaaaatttttttttggtaaatgaggtctccctaaggttgcccaggctggtctccaactcctgggctcaagcaatcctcctgcctcagcctcttggagtgctgggattacaggcatcagccacacctgtgcctggccagaggggtggtgctatagagtacagagtgctaaatggctgagctactgagtcccttggggagggagggaaagagggaagcacggtatctggagtgggaagcaaacagtgtagttgtacagtagttaggtcttgaaagagagaagaatctcttgagaaggaggaaaataggggcctagactcctggattctgatacgagtaggggaggagtgagccttgaaccggaggggacaggctcatccctgtatgcccaggactgtccccatttgaaaacccaaggctgggcccggtggctcacgcctataatcccagcactttgggaggccaaggccagcggatcatgaggtcaggagatcgagaccatcctggctaacacagtgaaaccccgtctctactaaaaatacaaaaaaattagccgggcgtggtggcacatgcctgtaatctcagctactcgggaggctgaggcaggagaatcacttgaacctgagtagcagaggttgtagtgagctgagattgtgccaatgcactccagcctgggccacagagcaagactctgtctcaaaaaaaaaaaaagaaaagaaaaccgaaagccccacatcttgggaactccctaattagagctcatattaatttgtccctggggtaggcaatggctaagggacctggattcttatgtttgtgactgtataaggacactgtctttcccctttttgcagccatgccagtgacggtaacccgcaccaccatcacaaccaccacgacgtcatcttcgggcctggggtcccccatgatcgtggggtcccctcgggccctgacacagcccctgggtctccttcgcctgctgcagctggtgtctacctgcgtggccttctcgctggtggctagcgtgggcgcctggacggggtccatgggcaactggtccatgttcacctggtgcttctgcttctccgtgaccctgatcatcctcatcgtggagctgtgcgggctccaggcccgcttccccctgtcttggcgcaacttccccatcaccttcgcctgctatgcggccctcttctgcctctcggcctccatcatctaccccaccacctatgtccagttcctgtcccacggccgttcgcgggaccacgccatcgccgccaccttcttctcctgcatcgcgtgtgtggcttacgccaccgaagtggcctggacccgggcccggcccggcgagatcactggctatatggccaccgtacccgggctgctgaaggtgctggagaccttcgttgcctgcatcatcttcgcgttcatcagcgaccccaacctgtaccagcaccagccggccctggagtggtgcgtggcggtgtacgccatctgcttcatcctagcggccatcgccatcctgctgaacctgggggagtgcaccaacgtgctacccatccccttccccagcttcctgtcggggctggccttgctgtctgtcctcctctatgccaccgcccttgttctctggcccctctaccagttcgatgagaagtatggcggccagcctcggcgctcgagagatgtaagctgcagccgcagccatgcctactacgtgtgtgcctgggaccgccgactggctgtggccatcctgacggccatcaacctactggcgtatgtggctgacctggtgcactctgcccacctggtttttgtcaaggtctaagactctcccaagaggctcccgttccctctccaacctctttgttcttcttgcccgagttttctttatggagtacttctttcctccgcctttcctctgttttcctcttcctgtctcccctccctcccacctttttctttccttcccaattccttgcactctaaccagttcttggatgcatcttcttccttccctttcctcttgctgtttccttcctgtgttgttttgttgcccacatcctgttttcacccctgagctgtttctctttttcttttcttttttttttttttttttttttaagacggattctcactctgtggcccaggctggagtgcagtggtgcgatctcgactcactgcaacccccgcctcctgggttcaagcgattctcctgccccagcctcccaagtagctgggaggacaggtgtgagctgccgcacccagcctgtttctctttttccactcttcttttttctcatctcttttctgggttgcctgtcggctttcttatctgcctgttttgcaagcaccttctcctgtgtccttgggagccctgagacttctttctctccttgcctccacccacctccaaaggtgctgagctcacatccacaccccttgcagccgtccatgccacagccccccaaggggccccattgccaaagcatgcctgcccaccctcgctgtgccttagtcagtgtgtacgtgtgtgtgtgtgtgtgtgtgtgtgtgtgtgtttggggggtggggggtgggtagctggggattgggccctctttctcccagtggaggaaggtgtgcagtgtacttcccctttaaattaaaaaacatatatatatatatatttggaggtcagtaatttccaatgggcgggaggctttaagcaccgaccctgggtccctaggccccgcctggcactcagccttgccagagattggctccagaatttttgccaggcttacagaacacccactgcctagaggccatcttaaaggaagcaggggctggatgcctttcatcccaactattctctgtggtatcaaaaagaaaaaaaaaaaaaaagaaggagtcggggccgggcgtggtggctcacgcctgtaatcccagcactttgggagaccaagtcaggcaatcatctgaagtcaggagttcaagaccagcctggccaacatggtgaaagcatgtctctattaaaaatacaaaaattagccgggcgtggtggcgggcgcctgtaatcccaggtatttggggggactgagacaggagaatcccttcaacccgggaggtggaggttgcagtaagtcaagatggcaccactgtgctccagcctgggggacagagcgagactccatctcaaaaaaaaaaaggaatcggacgaagaaccacaggatgttgaagacaactgtctgaagtatttgtgagggacagcgatgtggccctctgtgttaagaataacgtgtcctgctttggcagagagaagaaaatagccactgcccgctttcaaggcaagatcgaccttttctgttttgttttgtttttctttctttttcctggccatgaggacaaaaattactgagtggcccttaaagagggaagtttgttttcagctgttctcttttgcccgtaggtgggagggtggggattgctgcgtcctagctagaggaatggctttgcttgaatgtgtagtgcacacgcacgggtgtttctgtgtgctagttgcttcttgctgctgcttcctgcttgtctgggactcacatacataacgtgatatatatatatatatatataaatgtataaatatatattttatttttttttaaatccctggagcttctggttcctatcagttcctgttgttaatcgtagaaccgttgtcccttcccccattcccgtatccatcatgttctttttcttttaaatatcaatataaaggtaaaagaaggacttgtgctttcttaatgaggagggcggccgagcacggcgggcggatcacttgaggtcaggagtttgagaccagcctggccaacatggtgaaaccccgtctctacaaaaaaataaaaaagaaaagcgggggaggactctcggagaggggcaagggccagattcttgggtctagtgggagaatagggttggtgccaagacaaccttggcctcatcagaagatactagctggatctaggtcttctaaatgacttcctcaaaccaggagggctgggtgggatagaaatgaactagacttctccctccttggagtctgtcccctgagcacctcacaaatacaacgtcctaatttgagtgaaggagctttcctccccagtcacctcgtcctcccaggtccccccatttcagtaatagcctctcagagctgagaacccaagcacatggtggtaccttccccccgtctactcaagtcagtccctcatcaaacactgtctattcttccccctaaataccatttctaccgccctcttctccaggttcctggtccagctcaagttccattttgtttcacctgagctattgccccagcctccttctcctccatcccaccctggctccagagggattctttcatcatgcagatctgatcctgcccttccctgctgaagtccttccgtagcccattgcctataggcactatcaaagcccctgggtctggccttcatgatctgatcccgcctccattcccactatcagctccctccttaccctccaatctaagcctctgaatatacctggtcaacagaagaccttcataaagatcaaatgagctactgcaaccaatctctgtcccacagaaggccatcttgtccatttctgtaggctccaaccctatggggcttagcaggtgttctccccatgtgcagagatgagagattgtaataaataaaggcacaagacaaaaataaagagaaagcagctgggcccaggggaccactatcatcaagacgcagagaccggtagtggcccataacggctgggctcgctgatatttattgcatacaagacaagggggcagagtaaagagggtgaatcttcgaagtgattgacaaggtgaagcaagtcacgtgatcacgggacagggtgcccttccctcttaggtagccgaagcagagacagaaggcagcatacgtcagtgttttcttctatgcacttctaagatcaaagactttaagactttcactatttcttctaccgctatctactatgaacttcaaagaggaaccaggagtatgggaggagaatgaaagtgaaggaggagtgtaagcattgaagcacagcaccacagggaggggtttaggcctcgggatgactgcgggcaggcctggataatatccagccttccacaagaagctggtggagcagagtgttccctgactcctccaaggaaaggagactccctttcgtggtctgctaagtaacgggtgccttcccagacactggcgttaccacttgaccaaggacccctcaagcggccctgatgtgcgcgtgacagagggctcacctcttgccttctaggtcacttctcaccatgtcccttcagcacctgaccctatacctgccggttattcctagcttacattagtaatgcagcaaagagtaatattaaaagctaatgattaataatgtttataataatgattgataattgtccatgatcatctctacatctaatttgtattatgactattcttattctaactattttgtttattatactgaaacagtttgtgccttcagtctcttgcctgggcacctaggtaatcctccgcctacatatttcccggacctcaggagaatcacaaatacacaaataaatataagccctacaaaattcccagatcaggcccggcgggtggctcacgtctgtaatcccagcactttgggaggctgaggcgggtggatcacgaggttaggagatcgagaccatcctggccaacatggtgaaaccccgtctttactaaaaatacaaaaattagccgggcgtggtggagggcacctgtagttccagctactcatgaggctgaggcaggagaatcgcttgaacctgggaggcggaggttgtagtgagccgagatcgcgccacactgcactccagcctgggagacagagcgggactccgtctgaaaaaaaaaaaaaaaaaaaaaaaaaaaaaatatatatatatatatatatatatatatatatatatatatattccatgatcagccggcgcggaggctcacgcctgtagtcccaacactgggaggacaaggcgggaggatcgcttaagcccaggagttcaagaccagcctgggcaacacagcaagacctcgtctctatttaaaaaaaagttttaaagaaaattcgatgatcacagaacccgctatctgcatctacatccgcaaaagcaattggggagagataccgcaagggagggaagggttcccctggaaggggagaaggaaaggccagctggggcacacactgtcgttggatgaggaaaggcctccttttcatttctgcagcgtccactcttgagctccaacccactccatcgctgtcttcttaaaggacgcctcgcccacccttctctcccatcccatgcctgaatcccttctggaaggcatccgaaagaacagctatagaactctggggtgatacgttggttaactcgggaaagaactcaaggacactggactagaacgtggtgggattcctaggtcggtttcggggccatccccgccgcctatccttcgccctaggtcacctggaggtggctggaaggccagtggactccacatttagggagagtggttacaagaggactcggattcccccaccttcccttcggctttgggaatcccaggaaacccgccccgaacccctgaaaagtcccagagaaggtaagctgggcgtccagagtccctcccaggcgccgccgcagcgtcccgcccagcctcgcggggcacgccgggaggcggagttctcggtcgtgtcccgagagtggctggtccgcaggctcggactaccagtcccagaatgcactgcgcccgcagcccggggcgggccgtggttgcccctggcaacagagagggtctcccgggagcggggactgggaagcgctcccgagccggggaggcgcagagcccgaccagagagaggcggggacgcgggtagagcgaccaagaggtgtggaggccggaagagactgaccgcgccggcccttggagagacccctttcctgagagggggcgcacagagaggatgccgaagccagcgagatctagagagagggagacagggattgaatcacagagacacttagagggagggagagacctcaaagacagagagattcacagggccagagagacacgtagagtgggtcagagaagaggacagaggacagagacatagaaaagacaggagggagagagactgaatcacagagacacagggagagagggagagacctcagagatggagagagactcacagggccagatagacacatggagtgggtcagagaaggggacagagagagagacacagaaaagggaagagggagagagactgaatcacagagacacagagagggaagtctctatctagagaccctcgacagagattcctagagccagagacagagattcagagagccagagacacagagagattcatagagacatatagagagattcagagagcctgaatcacagagattcacagagccaacgagacaaacagagagattcatagagccagagacacagattcggagagtcagagagacatagaaagattcatagagccagagacacagagattcagagagtcagagagacatagagagacattcatagagccagagacacagagagattcatagacatatagagagattcagagagcctgaatcacagagattcacagagccaaagagacaaacagagagattcatagagccagagacacagagggattcggagagtcagagagacatagaaagagattcatagagccagagacacagagattcatagagacatagagattcatagagccagagacacagagattcagagagtcagagagacatagaaagacattcatagagccagagacacagagagattcagagtcagagaaacatagagattcatagagccagagacacagagagattcagagtcagagagacatagagagacattcatagagccggagacacagagagattcagagtcagagagacatagatttatagagccagagacacagattcagggagtcagagagacatagagagacattcatagagccggagacacagattcagagtcagagagacatagacattcatagagccagagacacagattcagagagtcagagagatgaatagattcagagagccagagacacagggagagtgaatcacagacacagagggacggggagatccccagaaacagaaagagattcatagagccagagagacaaatagagattgggtcagagagaaagggacagagacagagacagagaagagaagagggagagagattgggtcagagagaaagggacagagacagagaagagaagagggagagagagactgagtcatagacaggagagagacccccctagcatcagagagagagagagagatcaacagagccagagagggacaagtacagagaaacagatggaaccagagagatataggaagagacaaacaaaaacagagacggagttgcagaaccggaggaagggagagagacagagacaaaggcatttataaagacgggtggaggtgaggagagagagggagagacaggggcaagcatttagagagtgactcccagagaggaagacagagacggactcccaaagagatcaagttgcagagggagggggagacagagtcacagcctgagagagaatagagattcacagagccagagagacaaagacagggaaagaaacaaactcagggagacagaggcggaagaatttatcagacgtagagggagagacagagggagactgattcacagtgaggcagaccaagaccccgagaagaaccacgacaccaagacccagagatggcgacagatacagatggagacacacagcagaggaaatagagaaatagaaagaaatagaaacagcatttctcggagacagggaaaagaaaacagatccactgagaggcagaaacagagacacatcgagaaagctcgctccaggaatagagggagagggacagaggtcacaagaaagacacacgcaggcagagagctacacaaataatggagaggccaggggaggaaataaagactcagccggcatcggagaaagtgagaaccttagcgccctgcctgtccactgctggacccctagcgtggagcataaagtttgttgaaggaaggagaggggcagggtcagacacagggaccccagggcgcccacaggacacacgaggcaccctagtgggggaggaacgcggggcaggatgacagattgcagggtggtgggggggagccaggctcagaggatgcccctccctccagccagcccccggagtgggtgtgtgcacgtgtggggggcggggagggaggacatttgtcccgtgtctccgggaggggagcgcctttaagccgaaaccccgccctctcggtcgtcctggcaacgcctcccccaacccggggctcccacatttcagcaggtgccggagctggagctcccaccgccgccgcccgtgcctccggctgccggcgcccctgcctttggctcttcctccccactcgcccgctccccctggcggagccggcgcgcccggggtgccgctccctgcctggcgcgctccgcacctggaggtgccttgcccctctcctgcccacctcggaatttccctgtggctcctttgatccttcgagtctccagctcctctcccttccacctgtttcccccaagaaaggcaggatcctggtccctgctacgtttctggggccatggctggtctgggccccggcgtaggcgattcagaggggggaccccggcccctgttttgcagaaagggggccctgaggcagaaggtggtccacgaagtcaagagccacaagttcaccgctcgcttcttcaagcagcccaccttctgcagccactgcaccgacttcatctggtgagggaagggggctgggggactgggggacgaggggactaggggtgcagactcctatcacgccgacccctgtggaaggaagaaggagggggctgtagtcccgactcccaggttctaggatggccagggaacgctgggagcttcgactcctgggtttcagtgaggaggaggctggttcctggagtgctgggtccgagggaggaggaggctggaggacagaggtcctggagtcttgggtctgagggaggaagggcctggggggctgggagcctggattcctgggtctgaaggaggaagaaactgggggctgaactccagtctaagggaagaagggctgggggccaaaatttctgggttctagaaagaggaggtggccggggcttggacacctgggccctgcgggaggagggtcagagagcgcaggccccctgtggctcgcagaggttgggggtccaggtacccctttctgcactgacctaggatccctgactcttccaggggtatcggaaagcagggcctgcaatgtcaaggtaagagctggggaccggggctcctgggaccctcaggagggtggaggctggggccccacagctgaggctgcttgacacacgtgttctctggtccccagagaggcgcgggggagcccggggcggggggtgtggcagagacacagcctgtggtggggagggagctttgatggtggggccaccgcggaggtggtgctgggggcccctccctcggccggctccaggtggggacagatatttggagaatctgttgccatgggaacatggagatttggaaaaggggagctgaaggggggaagggggagggggctggagatgcaaagtcagagcccccccccaccccaggctgccgtcgccatgacaacaccagccgtcctaggcaggggcaggccgggtggggtcaccaatgggcgagtgggggccgggcggggccggcagttctggggggcgggagaggggggcgagtccttgagcaccagctgctactgctgagaacagagtgagtcagggtggggggcgggccggcagcagcgcccccagactcacttctgcccaagttgctgcttcctgggctgcgtctgaagatatttcggttttcgctctttgaatctgtctgcctctctcctggctttctgatctccgtccgtgggcctgtgtctgtttgtcaatgggatcctattttctttctctctttttccatctcccttccctgagctctgtgctctgtgtctctctgtaagtctctgcgtctctgtttctgactctgagcccatctcttgggtttctgtctcctgcttctctctctggcctccgattttctctctgttggactctctgtgttgagatccctctctttctggttttctcagtgtccgagttccgctctctctttccaattttctgtctgctggggtctcccgctggactaatccatgcctccgtctgtgtctctatgattttcatctatagtctgcagctttgtggttcatcgacgatgccacgaatttgtgaccttcgagtgtccaggcgctgggaagggcccccagacggacgtgagtgctcggacacctggttctcctcctcgggccgtgcccccgccctcaccccctcggcgtccgtcccaatttctcctgctatttttatggctgggaggggaggggggctggagagatagggggagctatctggcccagattccttgcccttggcctggaaagggggaatgcgagggggactgacaggctggggacacgggtggggcacagagaggaggccggggtgaggagactgaagatgggtgctgccgggggtgggctgtgatccaggggtgaagggatttaaaaattgagagctgaggggcacacggagaaaaatatcagtgcaggtgcggagatgccaacataagacagagggaatctcagggagaggaacagagacagaagaagacagagacctaggagagactgaagctgaggcagagagagagagagatggagcagagaaagaaccagggagaaagagaggaatttggaggcaccaaaagatggacagagaaactccaagagacggagacacagacacctggagaaagagactaaaatagaaaatggtggatacagacaacagcttaggagatgctgagaggagacccagggaagtcccacagtacacttgcacacatgtgcgtgcatgtacagatgcccctgtcatcacagatgtgcagcacgcagagacacacagcctctccccaccccctctctctccatcagaggctcacaagaccagtcaaccctgagtgcccattcccgttcccttttctgctttatctctgagcctcagtttcctcctctataaaatggggctgatgatctagcattgaccaacagaactgtttacagtgacggaagcattctgtacatgcactgtccaataggcagccaccagctccatgtagccagtgagcacttgaaacagggcgactgtggctgaggattagaaattccatttcgtgtcatttgaattggcttaaattttttttttttatttttattttttgagacggagtcgcgctctgttgcccaagctggagtgcagtggcgcagtctcagctcaatgcaacttccgtttcccaggttcaagcaattcttctacctcagcctcctgagtagctgggactacaggcgcatgccaccacaccccgctaattttttttgtatttttagtagagatggggtttcaccatgttggccaggctggtctcgaactcctgaccttgtgatccacccgcctcggcctcccaaagtgttgggattacaggcgtgagccaccgcgcccggcagaactgacttaaatttaaacagccacatgtagttagtggccaccaaatgggacagcacacatctggacacttccaggcttgttttgaagtcaggtgggttcagagtttcgcccagggtttgacacaagatcggagacagttttatgatgtacagatggagagagaggcagagagagagagatccacagaagtccatgaggcgttttaccaccctctcagctgaaaataacagaagtctacatagaagatgtgacttcatagaacatatattgagcaccactgtctaccagcacgtgtatgtgattgatgacccccctcgtccactcacctccgccaccaacaccagataagtctgatgcatccagtgctcattgggtacactcatcaagatttttttttttgttttttgcctgtaatcccagctactcgggaggctgaggcagaattgcttgaacctgagcggcagaggttgcagtgagccaagatcacgccactgcactccagcctgggtgacagagcaagactttgtcttggaaaaaaaaaaaaagatttttttttgtttttgttgttttgtttgattttggggtattttttagatggagtttcactctgtcacccaggctggagtgcactggtgcaatcttggttcactgcaacctctacctcccaggttcaagcgattctcatgcctcagcctcccgagtagctgggactagaacaggcatgagccaccatggccggctaatttttatatttttagtagacagggtttcatcatgctggccaagctggtcttgctcctgacctcacgtgatccacccacctcggcctcccaaagtgctgggattacaggcgtgagccaccgcacccagccgatttttggggttttttgagacagggtcccactctgtcacctagactggagtacagtgatgggatcatagctcactgcagccttgaattctccaggctcaagtgctcctcctgccccagcttctcaagtagctgggactataggcacaagccacaacacctagctaattaaaaaaaaatgtttttgtagagatggagtctcactcactatattgcccaggctggtcttcaactcctggtctcactcgattctcctgcctcagcctcccaaaatgatgggattacaggcgtgagccactgcacctggcctcaagtattttgtatacagtataggttggatccacacaacagcttatttggttatttttccctgtctatctggtttgaatcccagctccaccactttttggttctgtgacatttcctgagttaatttacctctctgcacttgttgaattccttgtttgtaaagtggagatgataattatgctcactatggattgttttgaagatttagtgagtcagacatttgggatggtttctgacacatagcaagagccaaaatattattttttattcttgttaaaattattattatgaccaatgaggaaacgagtgaatagtgagaaggagatctttcctctgcatcactcgggggtttttttgtttttgtttttttttgctgttgagacagggtctcactctgttgcccaggctggagtgcaatagtgctatcactgctcactgcagtcttgacctccggggctcaagtgattcactgctggcagttgatcttcttaaaagtaacatgcaggccaggcacagtggctcacgcctgtaatcccaacactttgggagaccgaggcgggtggatcacctgaggttgggagttcgagaccagcctgaccaacatggagaagccacgtgtctactaagaatacaaaattagctgggcgtggtggcacacgcctgtaatcccagctactcaggaggctgaggcaggagaatcacttgaacccaggaggcggaggttgcagtgagccaagattgcgccattgcactccagcctgggcagcaagaacaaaactctgtctcaaaaaaaaaaaaaaaaaaaaaaaaaaaaaaaaaaaaaaggtaacatgccttgaccaggcatggtggctcatgcctgtaatcccagctctttgggaggctgaggcaagcggatcacgaggtcaggagatccaaaccatcctggctaacgcggtgaaaccccgtctctactaaaaatacaaaaaattagccaggcacggtggcacgcgcctgtagtcccagctactcgggaggctgaggcaggagtatcgcttgaaccccggaggcagaggttgcagtgagccgagatcacaccactgcactctagcctgggcgacagagtgagactccatctcaaaaaaaaaaaaaaaaaaaaagtaacatggatcaagatttggcaagaatgatttcatttagtccccagggagggcacatgcccccacttttcaagcggtaaatctgaggctttgaaaaggggcaggcgtggtgaggccacctagctgggtaggggatagaggcaagatttgaactctgatgtatgtaaccacagcctccgtgctgtctcctttttaacagcgacgttcacttttgagaataagaacagcagcctctgtctgtggatggtttgtgtgtcaggcagcctgctgagaaccttcacacacagcatcttatttagtgcggcaggaaccctttgagttagggtcagcggagatatttagaagcccagcacattgaaaaggatcctggaaactgccaacaccctcctctacccaaatatatattcaaactagaaaccccactaacatagatgaaaatccaagaatggcctaaatgttcaccctgtgataatccttttaatggattcttagaatcaagttatttaacaagcagatattgtcccgggggtagtgggtggcaggggagaaggagaagcttcactgatgacctgcattcttgcttaatggactctggaaatttagcattgcttcaaaatatagattatttatttccacttgacagaggaggatgctgaggctcaaaactgggaatgaacttgccccaaatcacacagctgagaagcggcctagctcttacttacattcagggctatgtagggacttcaataaaatccctaacaataaccacagtaatagtattgggagcatctaacgtggtaggcacagctatgttttgtacaccaattattttatttaggcctcctgggttcctattataactgagaggtcatgttctccattccacctggagctcagagaaggcataccatatggacactgacagaagctgccagtgaaggagctggggttcagggtggcccacaagtcctcaaataataacttgtgggagttggggggatgggaactatgggaggttggaagctcctgcctccttcatgttctgcccagatatcatttggtcagcgaggcccccctgccactccccctgcacacagttttgttgttgttgttgttgtttgagacagaatcttgctctgtcatccaggctggagtgcagtggcacaatcttggctcactgcaacctcggcctcctggattcaagcaattctcatgcctcagcctcctgagtagctgggattacaggcatgcaccaccatgtccggctaatttttgtatttttagtagagacagagttttgccatgttgcctagcctggtccggaactcctgagctcaaggcaatccgcccacctcggcctcccaaagtgctgggattacaggcatgagccaccgcacccagccaggaccaccgtatttaaaatttcaatcccccaacttctggtggtccccatccctgcctcattttttctccagagcacccattaccaaccatcaaactatatgttttatttatttaccatgtttacattctgtatccctccattaggaagtaaactccatgtgacaaagaggtttttttttttcatttgtttaatgctgggtccccacaccaagaacagtccctggcacacagcaggtgctcaatgattattggtacatagagtgaaagagatggagcctcaggctgacctagagagcaaggcaggaggaaaagataaaagggcccctcccctggggttttaggaccctcccaacgccccctaagccagtcttctctgcccccaggacccccggaacaaacacaagttccgcctgcatagctacagcagccccaccttctgcgaccactgtggctccctcctctacgggcttgtgcaccagggcatgaaatgctcctgtgagtgacctgggccttgccagggcccttccaaagcgcccggtctgggttccgggaaatgcccgggatggggtggggggtggagtcttggcttgggggcggggcctgaggtgctacccgcagctttcccctccaggctgcgagatgaacgtgcaccggcgctgtgtgcgtagcgtgccctccctgtgcggtgtggaccacaccgagcgccgcgggcgcctgcagctggagatccgggctcccacagcagatgagatccacgtaactggtgaggccccgccccctcgcctggccccgccccctccccaagtgtgaggcggggctgacccaaggcacttgtgctggcccagccctaccccaaagatggggccacgcctctttctatggtcacgcccacactcctgaccccaccccaaaggccgagcacacccagccataccccttttggctcgaagccccgcctccaacctggcttcttgcaactttctgcacctgttaatgactttgactttctttttttttttgggacggagtttcgctcttgttgctcaagctggagtgcaatggcgcgatctcggctcactgcaacttccgcctcccgggttcaagtgattctcctgcctcagcctcccgagtagctgggattacaggcgcgtgtcaccaagcccggctaattttttgtatttttagtacaaacggggtttcaccatgttagccaggctggtctcgaactcctgaccccaggtgatcccctcgactcggcctcccaaagtgctgggattaacaggcgtgagccaccgcgcctggccaatggctttcttttttgtttttattttatgtttatttttttgagatggagtcttgctctgtcacccaggctggagtgcagtggtgcaatcttggctcactgcaatctctgcctccggggttcaagggattctcctgcctcagcctcccgagtagctggaattacaggcgcctgccaccacatccggctaatttttttttttttttttttttgagacaagatctcgctctgttgcccaggctggagtgcagtagcatgatctcagctcactgcaacctccgcctctcaggttcaagcgattctcctgcttcagcctcctgagtagctgggactacaggtgcatgacactgcacccagctcatttttgtatttttagtagagacagggtttcaccatgctagccaggctggtctggaactcctgacctcaggtgatccgcccgcctccgcctcccaaagtgctgggattacaggggtgaggaccgtgcccggcaatggctttctgggtataaggatcttgagaagggagagtacctggttctgagggaggctgtggttcagtactggtgacatggccagggtccaaactctggttcctaatggagagaagggctctggatctgatttcagggtcactggttgcggaaagggctctatgccctgtcttctgggttctggagaggtaagaagtcatgagaaacgagactgagagcttggaattcttttttttttttttttgagacggagtctcgctgtgacgcccaggctggagtgcagtggcgtaatctcggctcactgcaagctccgactcctgggttcacgtcattctcccgcctcagcctcctgagtagctgggaccacagacacctgccaccacgcccagctaatttttttttttttttgtatttttagtggagacggggtttcaccattcacaggatggtctcgatctcctgaccttgtgatccgcccgccttggcctcccaaagtgctgggattacaggcatgagccgccgtgcctggccaagcttggaactcttgattgctgactggaggagggctgggagccccttcctggatctctaacccgtcacactcttcctcactccccgtttagttggcgaggcccgtaacctaattcctatggaccccaatggtctctctgatccctatgtgaaactgaagctcatcccagaccctcggaacctgacgaaacagaagacccgaacggtgaaagccacgctaaaccctgtgtggaatgagacctttgtgttgtgagtctggggtgcagggaaggcaatgacagctgacagagaatgatctgagggtcctagtggcccccagagagcagctgatgggaggggttaggatagagggaacccagaaaagggcagaagaagatggtgggaaaagggaatagagtgattgagggagtgggatggagatacagaaacggagagacagccagaccactgtataattagtctccattgaagcccccaactttagagttagacagagatgagagagagaagagagagtctcagaagaggcagaaacccaaagagagacacagatggagagggaggggagaagatgggggatggcagggagacagagatcagttgacaggaagacagagtgatagagacccagagaggagagaagggtacagagactcagagagagagatctcgagagacaagagacagagatgggaaggggcggagaatgcaggaggaagggagaggaagagctctctaggtttacttcaggccccaaagccctagctggagagagagcccggctgggaaggtcagaggtcggagaccgacaaagcaggagaggagccccagctggctgggtttgcccccacctccagcaccaaggatggggaaccgaggggagccatgagctcggctctgcaccccatccaccccaccttcctgcagcaacctgaagccaggggatgtggagcgccggctcagcgtggaggtgtgggactgggaccggacctcccgcaacgacttcatgggggccatgtcctttggcgtctcggagctgctcaaggcgcccgtggatggctggtgaggagcagggctggggcctggggatggagcgcaatattaccatctccatctgtgtgtggtctctctcctccaggccactgtccttccctctgcctcccagcatgcgcacacacacacacacacacacacacacacgcacacacacgcacacacccctctctctctattcttctcttcttctcccctccctttctccctctccctctctttttatctcactctttctctcttccatctctgtgtccgtctctctgtgtctctttcctcccttccaatgtctttgcctctcccatgggtgccccatccccgctgcccgcctctggtctccgtctgtatgtcaggtacaagttactgaaccaggaggagggcgagtattacaatgtgccggtggccgatgctgacaactgcagcctcctccagaagtttgaggtacccagaccctggcttcctcaagggagcccagcccagcctcccacggttcagagctggcctttccttccacccctgagtgcccgctggtcctgggactacagttcccagaagaccctaggactccctcctctgctcttctaggggactcgagccccagggtctgatgggaattatagttcctatctatcgccatggcttgagggtactaggggccaccagcccctgttctagggcgatcccctgcatctcttgggaccctgactctctctttcttttctcccaggcttgtaactaccccctggaattgtatgaggtgagtagaaccagggcgttgaatggaggcagtttttgcctacttctctgatttcttattcctcctctgacttctgtcttcaattccccacacatgagttgagcacacatttgtgctaggcctgtcttgtgcttgctgaataatccaggatccagagatgaatctgaccctcaagcaactctccaaggtagggacacagtcacagatacttaaaatacaggaagatgtgctaaattagaggtagcccagggcactgaagaggcctaacggaggcactaatccagcctgggggagggtggtcagggaggacttccctgaggaggtgacgcctgaattgattcttgaggttttttaaaattttttaatttatttttatttttatttttatttttatttctgtcgcccaggctggagtgcaatggcacaatctcgcctcactgcaacctccagctcccgggttcaagcaattctcttgcctcagcctcctgagtagctgggattacaggtgaccgccaccacacccagctaattttttttttatttttagtagagatgggatttcgccatgttggccaggctgatctcaaactcccaaactcaggtgatccgcctgccttggcctcccaaagtgctgggattacaggcatgagccactgcgcccgaccgattcttgagttttttattttttttttgagacggagtctcgctgtgacgcccaggctggagtgcagtggtgcgatctcggctcactgcaagctccgcctcctgggttcacgccattctcctgcatcagcctcctgagtagctgggactacaggcgcccaccaccatgcccggctaattttttgtatttttagtagagatggggtttcaccgtgttagccaggatggtctcgatctcctgacctggtgatccacccgcctcagcctcccaaagtgctgggattacaggcgtgagccaccacacccagccgattcttgagttttaaaaaatctatcaagcatgatcatcttaatctctccattcattcattcactcactgaatatccttctttttctttctttctttctttctttttttttttgagacagaatctccttttgtcacccaggttggagtgcagtgatgcagtctcagctcactgcaacctctgcctcccagattcaagtgattctcctgcctcagcctcctgagtagttgggattacaggagcgcaccaccacacctggctaatttttgtatttttagtagagatggggtttcgacatgttggccaggctggtctcgaactcctgacctcaagtgatccacccgccttggcctcccaaagcgctgagattagaggcgtgagcgaccacgcccagacgaatacccattttctagggtgtcataagccaggccctgttctgggaatagaatcaggccattccctggtggagctcttcttctagtggaggacaaagttacaaacccagacattcacaacgaggagcaatgctgctgtaatggagacagcctcaggcactggggcgtccctggcacagcctgagtcagagaaagcttcctagagaggtgagacctggtagaagggcgggatttcccaaaggagagaccagattttcaggcaggaggaagtaatgctctctccctcatttaccctttcaaaaaatactttacagagcatctttgtgtgccaggcgtggctctactcactggggatatagagaaagcagggaaagaacaaacaaacaaacaaaaaagttcctttccttatgggatttacaccgggaggaagacattaaacaaaatatataagcatatgatagactgggcacgatgcctcatgtctgtgatcctagtaaggcgggcggatcacctgaggtcaggagtttgagaccagcctggccagcgtggcaaaaccccatctctactaaaaaatacaaaaatcagctgggcatggtggaggcgcctgtaatcccagctactcggaaggctgaggcaggagaattgctggattccgggaagtagaggctgcagtgagcccagatcgctccactgcactccagcctggatgacagagggagactctgtctcaaaaaaaaaaaaaaaaaaaaagaagacaagaatcttcaagattcaacaacagcaacaacatgttatagtctttactggactcttacagaaactttcaccagagtttttaatgttgtgtgtgggggttcacctgcatcagaattcctagagtgcttgcttttaaaagcacattccccagcctttctgcagacctactcagtgacgatctctctgatgcctcaaatgtctgcctactaaattaattcctcaggtgatccttttgcaaagttaagtttgagaatgggctctgcggccgggcgcagtggctcacgcctgtcatcccagcactttgggaggccaaggcgggtggatcacgaggtcaggagatcgagaccatcctggctaacacggtgaatccccgtctctactaaaaatacaaaaaaattagctgggcgtggtggtgggtgcctgtagtcccaggtactcaggaggctgaggcaggagaatggcatgaacctgggaggtggagcttgcaatgagccgagatcgtgccactgcactacagcctgggtgacagagcgagactctatctcagaaaaaaaaaaaaaagagagaatgggctctgcaggagacaagggtaccagcgggaggacattctgagccaaagaggtagagtcttttgagatcagcagggatgatcctcccgtacaaacccaagaaacccagcagggcagatggtgggcaaaggcctagaggcagggagtgtagggtggtgtgtgtgcctgttgtggctcacagcactctcccacagttcagcaggcaccacttaatattaccaatgaacaccaactctgtgccaagccttgagctaggtacggggctaacaacacagcaaacagaaacagccctgattattattattattattattattattattattattattattattatgtatttatctatttgagacacagtctcgctctgtcgcccaggctggaatgcagtggagcgatctcagctcactgcaacctctgcctcccgggttcaagcgattctcctgccttggcctcccaagtagctgggactacaggcatgtgccaccatgtcctactaatttttatattgctagtagagatggggcttcgccatgttggccaggctggtcttgaactcctgacctcaggtgatctgcccacctcggcctcccaaagtgctgggattacaggcatgagccaccgcacccagccctcaacaaatatttatgtagcctcaatgaggtaggcagtgttactgtgtcttagcgaacaaagcagacccctgccttagggagctcacaggcagaaagcagatagtcacacagatagatgtaaattactaagaataaaagtgccaggaaggtgctgtccatggtgaccaaggggtggtaagagaggcatctgacccagtttaaaaagtcaggcgaggcctctatgaagtgatgcttgagtcaaggtctaaagggtgtttgggagacaactaggagggaaggggaggggagagctttacaggaagacctaacggcacatccagaggccctgaggtgggagggaggacaatgagtgtcaggccagggtggctggaccatggagcctgggagagagaagaacaacctgcagtgtcagtctcagcctggctctgcaagtcatgtggaataaaatcttaacacagagggagcagttaaagggtttacaagcataggggagacatgacctggtttatttatttttaaattggctcctgtgcctgctgagtagagaatgcattagaaagggcagccgtccatgtagagggacaagtgtggaagctgtgacagcagcttagtcttgggccccctccctggggggccgaggcaggaaaaggtagagaagggaccctagctgaaagccaggtgtgctccctggactggcagcacccatgtcacccagaagctttttacacataacgattctcaggtcccaccccagatttatagagttagaaaatctggcagtgggacccagcaatctgttttaccaaaccctctagggaattccggcttagaggctaagagcaaccagattctagagctggactgcttgggtttcatttctggctctgtcctttacctgctgtgtgacttggggcaagttacttaacgtctctgtgctagtctcctcttctgtaaaatggaaacgatagcagggttttctggaaacagcatatgataagctatctaaaaaaaaaaaagaagaaaaaaagagctaagtgtttgttgaataataaataaaccctccaggctatggggagtcagagaaaattaagccaaggacagggtaggagggtggccattttcctctgtctagcgattctcatcctttcctttcttgggtgctgtgtctcttgggagcatttccttatcgctgtgtaaggtctaactgcctctggctctttctttctcctttccacagcgggtgcggatgggcccctcttcctctcccatcccctccccttcccctagtcccaccgaccccaagcgctgcttcttcggggcgagtccaggacgcctgcacatctccgacttcagcttcctcatggttctaggaaaaggcagttttgggaaggttggattcctggggttctgggggaaagggaggatgtctgtgggaaggtcagatttctggttcttagggaggaagtgggggtgggaagagactgggctcctgcatcttcaaatatggttaggttgggccgttcaggttcctggagaggagaggtttacagatgtggacactctccttgaggggacgggcggcaagtcagggctgtcagtcccttaagagatggaggaagggcctgggatcccgtttccctgcgtcccttagggagggggcaggtcctgtaccactgggttcccaacatggactggcccttttggaactgtgcgcataggtgatgctggccgagcgcaggggctctgatgagctctacgccatcaagatcttgaaaaaggacgtgatcgtccaggacgacgatgtggactgcacgctggtggagaaacgtgtgctggcgctggggggccggggtcctggcggccggccccacttcctcacccagctccactccaccttccagaccccggtaaggatggagggggcggaggctgtcctccgggccctgccttatccagttctggacatctgcgttgggattctgagtttagggcgaggcaagagaactttgtgctctctgagtgggcgaggccaggcggattgtctcctcagggggcgtggccgggggggggtccttggggggcgtggccaggcgaagggactcatcggggggcgtggccaggcggaggggctcaacggaggcgaggccgggtggaggggctcctcgggggcgtggccaggtggagggactcatcgggggcgtggccaggcagaggggctcttcgcggggcgtggtcaggcggatgaaatctttgggggggtggtttagaggggcgggctttgtcaggcgatgggatcattaataggcgtggccaggcagattggctccttgggggcgaggccaggcagacgagattatgaatgagcgtatccaggcaggtagattcttcggagggcgtggtcgggcggatgagctcctcgggggcgtggccaggcggtgagttcctcggtggcatggcctggccaggtgaatgggtcctgcggaggtgtcgtgaagcggttgagttccttgggggcgtggccaggtggatgggctcttggggggagtggccagatgcctgtttccctggggagcttggtcttgagtggctgtagccagtgctctggaattttcagcaaaggggcacagtggaggagggtgccttcctagtgggcctgcccagaattgggctccgagtgacggggtcatcacttttggattctgactgaaggacacatcagaaacaggacattatttccttaggattgcgacttaggggcagagagtcagaacctgcaagattttaagagggcgtgactttacttccaggggctccgaatgagagtggccagccacctggattaaaatatatgtatgagcaactttgattcctttttttttttttgagaaggagttagctcttgtcccccaggctggagtgcaatggcgcgatctcggctcactgcaacctccgcctcccgggtttaagcaattctcccgtctcagcctcctgagtagctgggattacaggctcccgccaccacactcagctgatttttgtatttttagtagagaccgggtttcgccacgttggccaggctggtctggaactcctgacctcaggtgatccacccgcttcggcctcccaaagtgctgggattacaggcgtgagccaccacgcccagctgcaactttgattcttagtaggaagccagaattgcatctgtgtgtgagtggctgtggaaagagattttggtgttcccggatttcgagcgaatggtgggcttcagtcttcaattctgagaaggcggggccagaacacgtggtctgatagttggcggtggtctggcgggtggagattctgaggtagcaggattagcaccttagggccctcccagggatgtggctaggtgctctgaatttctggttgggtgcatctggaaccttccacgtctgtcctgagtgatcaggaaagaaattctcctactctgggtagatggatcccgcctctaagcccatgcacttctccgcaggaccgcctgtatttcgtgatggagtacgtcaccgggggagacttgatgtaccacattcaacagctgggcaagtttaaggagccccatgcagcgtgagtctcggccaacagagaatggtcggggtggtggaagggggcaggatccagccactgaccttctgacgtccccacccaccccgtcctccaggttctacgcggcagaaatcgctatcggcctcttcttccttcacaatcagggcatcatctacaggtgagcagccccaggaatttccgtggaggaaatcacgcccctggaagggaagggatttgaatatgtggctctagactgctgaactcaacacttcttgcaattcctgccccacacccctgcatcgtccagggacctgaagctggacaatgtgatgctggatgctgagggacacatcaagatcactgactttggcatgtgtaaggagaacgtcttccccgggacgacaacccgcaccttctgcgggaccccggactacatagccccggaggtaaccccaaccctgctgctctggtcacgctttgagatcccttagagggtgtagctgatggtccagtattcaccacgggtgaggcctgaccctcagaccttgtcatgagttgtggccttcttacacagccagtcgttcctccagcctccagcacaggtgagcttggcactgagcctgccaggtgggcccagctgggtctctaaataggtaaggtgggcagcacctgtgggtgaatgttccaggagagtgggaccagctcgtaggaattccaagtaggacctgaccctggatccttctgagaaggggcagacgatttctagtgtactctgagtgggtgtggcctgtcccctgccaacactgaacatgtccggactatcttctgaatactttaaactgggcagggctctccctggagtattcagttggatggaagcttatttcctgtgttgtacgtgtttctctgatgtaagtgtactggacttctgtgctgcatttttcaagagggcaggatcagctgggcgcggtggctcacacctgtaatcccagcactttgggaggctgaggcaggtggatcacttgaggtcaggagtttgagaccagcctggccaacatggtgaaacctcatctctaacaaaattacacaaattagccgggcgtggtggcatgcgcctgtaatcccagctattcgggaggctgaggcaggagaatcgcttgaaccggggaggcggaggttgcagtgagctgagatcacaccactgcactccagcctgggtgacagagcataacttcataacttcatctcaaaaaaaaaaaaaaaaaaaagccgggtgcagtggctcacacctgtaattccagcacttgggaggctgaggcgggcggatcacaaggtcaggagtttgagaccagcctgactaacatggtgaaactccatctctactaaaaatacaaaaattagccaggcgtggtggcgggtgcctgtagtcccagctacttgggaggctgaggcaggagaattacttgaacccgggaggtggaggttgcagtgagctgagatcgcgccactgcactccagtctgggcaacagagtgagaccctgtctcaaaaaaaaaaaaaaaaagaaaaagaaaaagggcagggtgagatccctaaggttctgggagagcagatgctgtcctatgagtattttaagtgggtggggtattacccgactttgttaaaggggtggggctgatgttctgaatgtacgtatagatggataaagcacatgcctgtagtcccagctacttgggaggatgtgcctgactcgtgcccaaataatcaatgtcagtgatcacaaaacctggctggtaatcagaatcatctgtagaaaatttgaaaactgaggccagacatggtggctcatgcctgtaatcccagcactttgggaagctgaggcaggcagatcacttgaggtcaggaattcaagaccagcctagccaacatggtgaaaccccgtctctactaaaaatacaaaaattagctggacatggtgatgtgtgcctgtcaacccagctactcaggaggctgaggcaggagaatcacttgaacccaggaggtggaggttgcagtgagccaagattgcaccactgcactgcatcctgggctacagagtgagactccatctcaaaaaagaaaaaagataagaaaatttgaaaactacacacatattcctgactctgacacaaatattctaggtgggtggaaccagtgacttggccgttaggtagtctttctatttgaggccaaatgaatgtttgaagtaggtatgctttgtttccagaatattccaaaagttagatcgctggccaaaatattcagagtggaggctgggcgtggtggctcactcctataatcccagcactttgggaggcggaggcaggccaattgcttgagtccgggagtttgagaccagcctgggcaacatagtgaggacctatcttcactaaaagtgcaaaaattagccaggtgtggtggtgcacacctgtagcccacctacttgggaggctgaggtagaagaattacctgagcctgggaagttgaggctgagtgagccgtgatcacactactgtgctccagcctgggcaacagagtgagaccctgtcaaaaaaaaaaaaaaaaaaaaaaaaaacgaaacaaaaaatcacctgatgaaataaatattcagagtgggaagagcttgtgctgaaagcacttaacgtgggtagcgctcccagggggtgaggccagaggggtcctaggcttcctaaagaacgcatcatgattccctgccttccacctcccctagatcattgcctaccagccctatgggaagtctgtcgattggtggtcctttggagttctgctgtatgagatgttggcaggacaggtaagggaaggtggggagaagctggcttggctaaaagagacagagaggggcacctggatctcaggaggagccagttagaaaggagcccagaaggttgtgctcgaatagcgctgtccatggttctgaagtgttgtcttaatgtagaccaggtgttttgttttgttttgttttgtttgttctgttaccatggattctttctccctagatggtaaagtagcagtctggttaagcctatggatcccttctcagaagaatgtttttcaatgcacaaaatagaataatacatacgcagaaaaccaaggttcaaatcctcactttgccacttactggctgtgtcagcttagacaattacatacattctaaatcagcttgattggattcctggactgctgagtgtactacaactaaaaaaattggttaccacactcttgatcatcttcttagctggctatggtagtgggcacctatagtcccagctactggggaggctgaggcaggagggtcacatgagcccaagaactcaaggttacactgaactatgagtatgccactgtgttccagcacaggcgacagagcaagaccccatctcaaaagaacaaacaaacaaaagaaatcaatcattttgaaagatagtcaccaaaacttttaaaatttaattgaatctaacaaccaactaaattcaatgtatacagttgtctaaatatttaaaattggaaaatggacatatgtgcaatttcttattaattcattaagtagtaagttctaatggtagtaaagtaaaaaggagctctaacagtaattttgatgtagcaatgactaataatttggaatatctgcaactctcatgtgatgagaaaatacctgtgattactattgataatgaagccacaagcactgctgctgcctgcattcataactgaagggaatgctaaattttagttagaagttaaaaaaaaatttggccggacatggtggctcacgcctgtaatccaagcactttgggaggccgaagtgggcagatcacttgaggtcaggagtttgagaccagcctggccaatatgatgaaaccccatctctaaatctttgccttggtatcattttttgtaacctcagaagactgtgaactactcatccaaccaggagaatgcttttagggtgtttcctgcagtttttcctctcttctatttaactgacatgttgcataattaacagcctgctgatttacatagcagataaagagaggcagaatagtacagagatgcacagatctgaggcatccgagataggaaatgagagaacctgagaaggagagagatcaagctttggtggtttggtctgatctctcctgagggtgtggtcaggtgtgcatgtggggcgtgtgatgggtcaggcatgttcccggtggggtgaggagggtgtggaaggtttggggaaaggcagttgggcatgtccctgactctctatcccctccactttgatagcctcccttcgatggggaggacgaggaggagctgtttcaggccatcatggaacaaactgtcacctaccccaagtcgctttcccgggaagccgtggccatctgcaagggggtgagagccccctgactcccagcttctccaggctcacaaccacacaccccattgctgtctctgtgcctattagaaaaatgctcccattcctgaagtcactttacttccatctgttggaaaagttgatatgatgcataggttttgttagaacaatgatttccagccctgttgccacgaggcctggagatggcctctgtctcatccttctctgtgactcccactccccagctccctgcttgcaggaagtgctgaaagtccagggtgtctgtctgtctagaactgggtgggtcaggtaaacccaacttctgcagcttttcttcctgtgtgaacttgggtgagtcaccaaaactttgtgagcttaactctcttcaggggttatggagttgacacagaagaaagcacctggcccatagcagattttcagcccatgtcagcaccttctgcgtctagctgctctctctgcatctccctgacagtctctctggtttctgtctcatgcctcccctccatctgcatacgatggggctctctgtgtttcttccttttctctgtgtctccttctgcatctctgtctacacttttgggcctttgtccaacccccctaccccccatctctgtcccctcctgtgtccactctcatacacacacgctacatctcaccctcctctcctgctggctttctgtcctcccttttctctgggtctctgtccccatatttggtctttattcctccctctgggtgtgtgtttcctgggtctctatccttctctctttctgaatctctgtccccctgggtctcctctgtctcctcccttctctgagtttctgccttcttacctggggtctctgtaccaccctctgaatttctatttccccttttctctgggtctgcaacctctcttcccccattccctccctcttccccttcatctcctctacccttccctccctccccctaccgacctccctctgtccttcactctccccttccctccctccccctacccttccctctccccgtccctctctccccttccctctctccccctaccccttttccctctcctcttctccatctccctcatgatttgttctgtttctctgtgtgtccctgggtctctgggtatgaatttcatctgctatcattttcatgtatcctctccttcttcctgtctctctctctctctctctcactcactctcaccctctgtctctctctctctctgtccctcttcctctctctctcctctctgtctctctctgtctcgctctctgtctgtctccctcctcctcctcctccctcctcctcctcctcctcctcctcctcctcctcctcctcctccttcttcttcttcttcttcttcttcttcttcttcttttcttctctctctctctcctttcttttcccttcctccctccatttgcctgtttcccctggctgttcttatctctccggatctcatgcctgtgtctcttggttcctccatctgcctgtctctgtccctctttctctgggtctacctgtccggcactctgtctgtttgtctgtctgtctctctctgtgtttcccacagttcctgaccaagcacccagggaagcgcctgggctcagggcctgatggggaacctaccatccgtgcacatggctttttccgctggattgactgggagcggctggaacgattggagatcccgcctcctttcagaccccgcccggtcagtcaccctccaggcaacaaaaacctggtccctgaaggggtggggttcccctgggcctcaatatacctgtatgtgggggtggggttccctctgcagagccccccgcccccaacaaaaggaggtgcagacaccatgaagcatgaatagagattctgcaggagacaggagatgagactggggtacacagagggacacccgaggagccctcggagctgcttaactttccctcccccacgtctcccacagtgtggccgcagcggcgagaactttgacaagttcttcacgcgggcggcgccagcgctgacccctccagaccgcctagtcctggccagcatcgaccaggccgatttccagggcttcacctacgtgaaccccgacttcgtgcacccggatgcccgcagccccaccagcccagtgcctgtgcccgtcatgtaatctcacccgccgccactaggtgtccccaacgtcccctccgccgtgccggcggcagccccacttcacccccaacttcaccaccccctgtcccattctagatcctgcaccccagcattccagctctgcccccgcgggttctagacgcccctcccaagcgttcctggccttctgaactccatacagcctctacagccgtcccgcgttcaagacttgagcggagcccgatattctccctgaccttagcgttctggactctgccccaatcgggtccagagaccacaccactaaccatccccaactccatggggttcgagactccatcttggtagttctgtgcctccccccagaccccgcccctggggaaatagcctcacggggttggctgttccagactcaggttccagaacagccctcggcctccgaggctccccgcctccactctagttctagatgagtgggaggcgtgcccccctcctccagtacgtcccgctgctgtgctctggggatttctgggatatatggaggattctttccccagaggctcccaatcagcttttgttctagacttccccatcccgaagccatcacttctccccgcagcccgcctgccgtgcatggctcctgtctggctcggacccaccccaactctccccagtgcctgccactctctgggactctcctcctcccctcctcttcccttagcctctcccacccggccacagctgctggagaataaatttgggatgctgatgctgaagtgtttggatattttcttgtaagcttggagaatgaacggggtgtggaggcgggacagtgactgtacatagacacaaacagagaaggaaagcacggagacccacaaagtgagaggggagacacccactgcaggggagcaagcagagaagcgcgcgcagacagaggcaggagacccagacagacagagacagggagagaaaatatcacagagggcaccaacgtggacagtgcacagcgagagaggggcacggagatcactgagagtgccaggtggcgacccccgcgcagagacccagcgcgtccgtgttcaccagagcagccacgcaagctcacatgcacccccaggctcagacaccggggagaagtccttcccaagcggggagatcacagtctggcctcttcttgagagacctagagacctgatcagaggaagagacccccacgccagagcaaccaaaaacagccagaacccgagagcctaggaatcggcgacggaggcacacggcaggcagacgcgccttctgggcctctttcccttgacccacttgagagtctggggagtgccggggaccgtgcagatggactacatttccccgcaggcctcgcggcagacccttcccccaagtgcggctccttgccgccagggctgatgggaaatgtagtctccggtcagggccagaccagtggagcggtgtgccttgtctgtgtgtttggaggggactgagccccaaagcttcgcagtcttccttgcggacccgggcacgtcttcttccctgcagtctcctgggtttccatgacccggtccgggtggatgctggggctgcccctctctccctcatcaccgccgcgacacccccatccagtgcccgcaggccccagcccccgctccgaccctcggcgggcggcctgcccctttaagagtggccccgctgacatcacggcggggggggggggtggcccggctcctggctccgcggcggctgcaggacccgactccgctctgcgcccgcccgctgctgtagggaccccggcccgggacgccccctcccgcttcctgcagccgtccagaccccaggctccgccccaggcctggctagagccccagtcctcgtcaggggacccccaggattgtccctgctgtctctccttctcagagtctctctctgtctctctctgtctctctgtctctctctctctgcctctgtctctgtctcttctccaagctcaaggtctctgggtctcagcatctctcagccccaggcctctgggcgtccccctgtctctttctgtctcttcctggtctctgacctctccacttcccaggcctcagaatctctgcgcctaggtggtgaggggtggtcttaaactctgtctctctccctctttgtctctctctgtctctgtgtctccttcagtctccagacctgagtccctggatttctcggcctcaaggtctcggcgtgactttctctctctgccctgtctctctttgtgcctctgcccctctcgggctctctgcctctgtttctattctctctccctctctgcctcccccatcctcaaggcccatctccctccctcgctgcatccttccccccttccctccccgcccctcccctcctccgcagtagccaatgagcggccgccggttcctgctcccggctccgtccgccgagtgaggccgcggccgcggggggtggggggtgggaggccgggagggggccgggacgccgggctccggggcgggggcggggggcgcgggcaccggcgaccccggtggcggcggcggcggccgggggaagcctcggggccggtcatgcggctgcggggcccgcggcccggagcgtccgcccagccctgagcgaggtgagcgctagcggagggtcctgggaggaagaaggggcgcccctcgaggtggctgcgagccgggtttggggcaacaagggacccgagtggctccaggggtggtgagatcctggcggtcgggacgcccgaattcgagcggctatgggggatgcagggacacctgggcctggcgatcccggaggacggggtccgagggtcccggagtgggaaactgcactcctcgcgtccgagtcgcagcgagcgtgggctggggagggcagaggccgggtccctgaggaaggcgaggtacggggcgagggcggaggacccaggcccggccagagcaggatgtgggtctggaaaggggtcccagaaagggggagttacggtctcccgagagatggaggagagatggagtttgggcttaagacttgcagaaggggaccccggagattcaaatgcctgaatccgggaaagggtgggagaaagagggagaagaggaggcttcaggcctggggggagggtcccaaaggaggaaaggctggaggaataaggagatctgggcgggccagtgagagggaggaggaattggagcaaggttgggttttaaaacggggtgcgagaatgtggagaagggacgaggtcccagctgagagtcagaggggcgaaagggggaagctgagatcggctacctgggatggaggcagccagggtggccagggtgatggtgcccgtttccgagcccacagggctgcgaggggaccaggcagctcgcggtcaaacccctgagccgccaggcgggggatgggaggaaaagctggccagagcgttccctgactccggatctcggaggcctccaagaggttgggggggaaggaggggggatctggaggctgggagtgcggggtggagcggggaggagtgagggttgtctcagactccagagtctttattcaggtggagcagagttgcaaggttagaagaattctggtgaaggaaagtggagttttatgtcttgattagtttgtaggggagaatgttgaggggtctcaaccttcatagttaaaaagatcccgggtattcagggatgtagaggtctctggttgataaaggctaagggtcccaagttgagacccccaaatcacgggattgcgtggcttggggaaaaatcttgcaggggtcgggggagaatcgtgggtaaggaatttcaagtccttgagatctgggttgaggagctccctcgctggaatttctaggttcctaagtggaattggggaggccacagagatgaactgggatctcctgtttggagtctaatgttatgaaatcgggactccatgctggatgttgaagaagatctgtgattggaagtcccagcatgggaaaccggggtccagaacctctggtaggaagtttcagatcgtgtgttaggggagggggttttgggactcctgcttgagattttagagttcagggcactgaatcctagttggaaggatgagagaccgttgtttgactggggtgctctgatgaggatgctggattggtggtggtggtggggtccagctcattcatgatttttttttttgagatggagtctcactctgtcacccaggctgaagtgcaatggtgctatctcggctcactgcaaccttgcctctcaggttcaagctattctcctgcctcagcctcctgagtatctgggattataggtgtgagccaccgtgcccggctaatttttgtatttttagcagagacaaggtttcaccatgttggccaggctggtctcaaactcctgacctcaagtgatccacccacctcagcctcccaaagtgctgggattccaggtgtgagccacctcacccagtctcagctcctgattttgatgttctggaatctgtaatcgagattctggttctatgtctctgggttccaatgttctgggactcagcagactgtgaagatgttccaggattccaggtccaggagcctgcctagatctgggagggtggaattagggttctggagctaggttctggagtgaggaggaattggagcaagattgggttttaagacggggtgcaagaatgtggagaagggacgaggtcccagctgagagtcagaggggcgaaagggggaagctgagatcggctacctgggatggaggcagccagggtggccagggtgatggtgcccgtttccgaacccacagggctgcgagaggaccaggcagctcgcggtcaaacccctgagccgccaggcggaggatgggaggatgtcatgtgtgatgtcatcttaaattggggtatcaaatgaggtcaaggcacaggatcagagttagaaggtcatgggtcaagttcttggtgttagaattgggtgttaggctcaagatacaaatcttgagtgtaaacttcagtgggggcctctgctcaaagtcttagatagggctgaggtcaagggtgtgaagccctggtatggggttagagatccttggttagtgacccactttgggaatttctggatgtagttcagagacagggtgcaagaaaatgtatcagggcatcagattagggcatggagttaagactgggtagcctgggttagagtttctggccagctcaagttgtagagcatccagggttcaagcccaatgccctgtgctctgggatctaggtcctggctcagagttgaggttattgatccttgttggagtctggtgttcacaaccgggggcttcgatcgtcacacagagacagggctgcaggatgccaggtcctagagctgaaatcattgatctgcctaatagtttctgagtcactgatccacactcaaggttagggactctggtggcatctgatttctaaattagggtctcaggtcagcaggtgaggttaggttttggcagggggacctggttctggggttaagaagctcaaattagaatttctgctcggagtcacagtatttgggacccaggtccaaacacggttggagccaagattcaatctctgggcctgggctgaaagttgtgattagaaatctaattctggggttggggatctggatctggagctagaccacaggcagcaggtttggggagcccagccctgaggctgaggctcaacagttggtgtctctggtcagactctagggttggggtcatgggtcaggccacggaggtcagatctgagatttcgatttgggagtcagtgtctctggctagggcccagcatcccgggttgctgcatggggtcaagcactctggtcggtcccatggagctctgcactgtagcttcccttccacaggccccgcagggcgccccctgcctctgaggatgagtcactgcagcagccgcgccctgaccctgctgagcagcgtgtttggtgcgtgtggcctgctcctggtaggcatcgcggtcagcactgactactggctgtacatggaagaaggcacagtgctaccgcagaaccagaccaccgaggtcaagatggccctgcacgccggcctctggcgagtctgcttctttgcaggtacagccctcacccgtcttccactcaacagtttctgccttgcctggggtctgagagtcttagccatagtcccatcccttgagttccagaaatccagaaacggatcctgattctctcctggaagttcaaatttctacgtggagccccagtgactagccctttattcctggatctaggagccccaatgctccaggcccctaacccctaaggaattctggagccttcctttaaagtttgtagtctaggtttagaacttgtcccctgcacaatttcagtgctgaatgggcaagattaaaaaaaaaaaaatgcatgggacgggcgcggtggctcatgcctgtaatcccagcactttgggaggccaaggcaggagtatcccttgagctcaggagtttgagaccagcctggccgacatggtgaaaccccgtctctactaaaaatacaaaaattagctgtatgtggtggtgcacccctgtaatcccagctacttgggaggctgaggcaggagaatcacttgaacacgggaggtggaggttgcagtgagctgaaatcacaccactgccactgcgctccagcctaggagacagagtgagactccatctcactctccctagctctgactgctggcatgcacctgtagttccagttattcaggaggctgaggtgggaagattgcttgtgtccaggagttcgaggctgcagtgagctatgacggtgctgctgtactccaacctgggtgacagagcaaaacccagtctcttaaaaaaaaaaaaaaaaaaaaaaagaaaatctatacctcccagggaccacaaagaccaattcattgtaagaatcctggctccccagacctcgtcctctttagggaccacaagttctgatctacagcccctttgttgcttaagacctagagttccagccttgtcctccttcaagcaggagtctctagggcagttagaaagaggagttccaggccaggtgcaatggcttatgcctgtaatcccagcactttggggggccaaggcaggtggatcacaaggtcaggagtttgagaccagtctggccaacatggtgaaaccccgtctctactaaaaatacagaaattagccaggcatagtggcgcatgcctgtagtcccagctactcaggaggctgaggcaggagaatcacttgaacctgggaggtagaggttgtggtgagccgagatcgtgccactgcactccagcctgggcaacagagtgagactccatctcaaaaaaaaaaaaaagaaaaaaagaaaaagaaaagaaagaggaatcccagacagacatccacccacccgctttcccaacacccctggagtagtacagctcgtaacccttgggttaggccttgctcccccatcctggggtctcccctctatctgtcctgcccccacccccagcctctctagagcttaggagcctctcatccagccctgtctgtttctcttccccccaggtcgggagaaaggtcgctgtgtggcctcagaatattttcttgaaccggagatcaatttggtgacggaaaacacggagaatattctgagtgaggggatgtgggggcacctaggcacaagacagcaagatcacagccgagtcgtggagtcctgggagggggcaggactagggaaagggtggggtccaagggaaggaggggaggcttgaaagaaggcagaatgggccaggcatggtggctcacacctgtaatcccagcactttaggaggctgaggtgggtggatcacctgaggtcaggagttcgaaaccagcctggccaacatggtgaaaccttgtctctactaaaaattcaaaaattagctgggcgtggtggcgcgtgcctgtagtcccagctactcaggaggctgaggcaggagaatcgcttgaacctgggaggtggagcttgcagtgagccaagatttcaccactgcactccagcctgggcaactcacagagtgagactctgtctcaaaaaaaaaaataaataaaaggaaggaagaaagaaagaaggcaaggcagagtggtggttaggtaaggagaaagagcaaggttgaaggggtgaggtccggttggtgaggagcggtcaatcagaaagggggcggagttaagcccaaggaggtgtggcctgtgtgagggggcgtggcaggcttgtgtctgccgaggaaatatcaggggaaggagaagagtcagtggggaaggggaggagtcagtaaggaaagggaggagccaaacaaaaacgcagaggtggtgagagcagaggtcaaggaatggggaagtgtcccactggagattcccccctcacccctgtctctccccatcccctccccagagacagtgcgcacggccacccccttccccatggtcagcctcttcctcgtgttcacggccttcgtcatcagcaacatcggccacatccgcccgcagaggaccattctggcttttgtctctggcatcttcttcatactatcgggtgagcctaaggacttgggggttgggggggaccatttccagttccagggacctgtggttccttttccacttagccacttccttgctgtgtggcctgggaggaggtgcagaccctctctgagccccactttccttctatgtgcaatggaaatagcagtgcccattgcaaagcgtccttcagaggaccacattatagcgagggcttactgggtgctaattaggtaccaggctctattctcacactcgcaacaaccttgtgaggtaaatcctattaatagcccattttacagatatggaaacagacactcagagggatgaagtcatttgcttagggccatacaactagtgagaggtagagctgggaatgaaactcacgcaattcgcctccggaggctgtatttttaaccactgctgataaactgcaattaacagtttacaaggctgcttattttctgtgcaatattttgttttaaattttttcaaataaatggaaaagtccaaagaactgtatagggaacacccatgtagccaccacttagagtcaaccattgacaggtcactagacttgcatggtcttgcgtctgtccatctgtctatatgtccaaccatccatcaatccaccttattgtctagatgcatttcagagtaagtttcaggcatcactacacttcaccctacttacgtcatcgtacacgtgattagctagagttcaatatttgtttacagtttttttttccttcttttgaggcacaagcctcttttgcatatgtgatctcacacccgtctcctaacatcgctacccaggagttattattagcactcacttgataacatgggggtaccaaggcccagaattgcatagagagttgcccataagtaccaaggcccagaattgcatagagagttgcccaagatactagtgtaaactatttccagaggacttcagtgtccagagttccagcaatgccttttttctttctttcttttttttttttttttttttgactgagttttgctcttgttgcccaggctggagtacaatggcacgatctcagctcaccacaacctctgcctcccgggttcagacaattctcctgcctcagcctcccaagtagctgggattacaggcatgtgccactacgcccggctaattttctatttttttttttttttttaatagagacggggtttcttcatgttcgtcaggctggtttcaaactcccgaccgcaggtgatctgcccacctcggcctcccaaagtgctgggattacaggtgtgagcccctgcgcctggctttttttttttttttttgagacggagtctccctctgttgcccaggctggagcccactggcgtgatctcggcccattgcaacctctgcctcccgggttcaagcgattctcctgtctcaccttcccgaatagctgggattacaggtgtgtgccaccatgcccagctaatttttgtatttttagtagagatggggttttgccatgttggccaggctggtcttgaactcctggcctcaagtgatcctcctgccttagcctcccgaagtgctgggattacaggcatgagccactgtgcctggcctaaagcttttttcttgagtgttactctcctccaaatttcaactcagtccaatccaattcagtccaattcagctaaaatcagcccaaatcaactcagctcgagtacatttaactccatccatccaacccagctaaccccaattcattctgactcaattcttcagttcatttcaaatgaattcaacataatttaattaaactcaaatcaggttcttgtaattcagttgatagtttatgaacaaaccccactgcatgtctcagctccattctgtcccctggggccggcactcagctccctcttttcagtggctgtgcaaatcgttgaaaagggatcctccaactaagcaactaagatccaaagcacctgatccaatatcctctcctccagtctctgctcctcacccaggctcctcttggtgcaacctcccccatgccttcaacctaacctgaagagaccttttccagggaaagcagggtgcaacctccgtgcaaacttgaatcacagcgggtggagcccagacactgagctaaaataagacacggagaatatcacgatcctagagtgtgagagcggaaaggtctcatcatttttcaaatggaaaaatagtagcctagagacaaaaagtggggcaagagtagatagcatggggatttttattcaacctgtcaaaatcatgataaggaaagtcccattgtttgcggttcacaggaatggaaacagaggctcgaagaggcgacatagcttgtcaatggcagaactggattggaatctagggtattctgattcctaaatccatgcttataccacccactgcaccaggaactgactgcccaaggtcatgctgaggatcagtggtgcaggcaggctggaagtcacgtctctagggtaacaatagagtaattcggaagagattgaatccaactgcctgaattccttcctagcattcatttcacaggctatgacctatgcactccaccccaaggtatccaggcatgtgctgccaagcttggggtgtatagtggctgaaggccacatgttgtaaacctaggaagaattgggttcaaatcttgcctctaccacttacggtttgaaccaaagccttcttttgtggagttattgaggggacaaatcttgatcagtggttggcaagctttttctgcttagggccagatagcaaatattttaggctacgtgagccataggttctccgatgcaactattcaactctactgggatgcaacttggccactgtagtacaaaagctgccaggtgtaagcaaatgggagtggctatgttccagtgactatttgtggactctcaaatttgagttcaatgtaattttcatgtgcatgaaatattcttcttcttttgatttttttttaaatcaaaagaagaataataggtaaaaatcctgcttagctcacaaaccatacaaaagcaggcaatgggccaggtcatcatttgccaacccctcatttagatcatgaatgtaaagcatccgacccactgcctggactgtaacagtaagcactgaacacttgttgttttaagtaaataaataaatgtagtaatgatagtagtactagcggtggtggtgctggtgctggtgatagtagcagtagtagcagtacgagtagtaacaaacaatttttgaatttttattttacttttttattttttatttttttgagatggagtttcgctctcgtcgcccaggctggagtgcaatggcgcgatctcggctcactgcaacctccgcgtcccaggttcaagcgattctcctgcctcagcctcccgagtagctgggattacaggcatgtgccagtgcacccggctaattttttgtatttttagtagagacggggtttcactgtgttagccaggatggtcttgaactctcgacctcaggtgatccgcccgcctcggcctcccgaagtgctggaattgcaggcgtgagccaccgcacgttgcccttattttgattttttaatttttctccccttctggccaaatttcaaattttcccaacccagcctcctcaccatggcattatgctgccccaccaagattaagatcacaaaaaagaaggagatttaaaaggagaagttaaggacagaaatagtaccaatgccttgggacttggaatggaatagcctggggtgactgcctcctgttcgcaatgaggaaaccaggcctcagagagagaaagacagggattgccccagacctggtcattggtggagttgcccaggtctggtcattggtggagttgtcccaggtctggtcattggtggagttgtccccaggcctggtcattggtggacttgccccaggctggtcattggtggagttgccccaggctggtcattggtggacttgccccaggtctggtcattggtggagttgtccccaggcctggtattggtggagttgcctcaggtctggtcattggtggagttgccccaggctggtcattggtggacttgccccaggctggtcattggtggagttgccccaggctggtcattggtggacttgccccaggctggtcattggtggagttgtccccaggcctggtattggtggagttgccccaggtctggtcattggtggagttgccccaggctggtcattggtggagttgcccaggtctggtattggtggagttgccccaggctggtcattggtggacttgccccaggcccggtattggtggagttgccccaggtctggtcattggtggagttgccccaggctggtcattggtggacttgccccaggctggtcattggtggacttgccccaggctggtcattggtggagttgtccccaggcctggtattggtggagttgccccaggtctggtcattggtggagttgtccccaggcctggtattggtggagttgccccaggtctggtcattggtggacttgccccaggctggtcattggtggacttgccccaggctggtcattggtggagttgccccaggctggtcattggtggagttgccccaggcctggtcattggtggacttgccccaggtctggtcattggtggagttgtccccaggcctggtattggtggagttgccccaggtctggtcattggtggagttgccccaggctggtcattggtggacttgccccaggctggtcattggtggagttgtccccaggcctggtattggtggagttgccccaggtctggtcattggtggagttgccccaggtctggtcattggtggagtttccccaggtctggtcattggtggagttgcctcaggtctggtcattggtggacttgccccaggtctggtcattggtggacttgccccaggccggtcattggtggagtcgtccccaggtctggtcattggtggagttgccccaggtctggtcattggtggagttgccccaggctggtcattggtggagttgccccaggctggtcattggtggagttgtccccaggcctggtcattggtggagttgccccaggtctggtattggtggagttgccccaggtctggtcattggtggagttgccccaggctggtcattggtggagttgccccaggtctggtcattggtggacttgctccaggtctggtcattggtggagctgtcccaggctggtcattggtggagttgccccaggtctggtcattggtggagttgccccaggctggtcattggtggacttgccccaggctggtcattggtggagttgtccccaggcctggtattggtggagttgccccaggtctggtcattggtggagttgtcccaggtctggtcattggtggagttgtccccaggtctggtcattggtggacttgccccaggctggtcattggtggacttgccccaggctggtcattggtggagttgccccaggctggtcattggtggagttgccccaggctggtcattggtggagttgccccaggcctggtcattggtggacttgccccaggtctggtcattggtggagttgtccccaggcctggtattggtggagttgccccaggtctggtcattggtggagttgccccaggctggtcattggtggacttgccccaggctggtcattggtggagttgtccccaggcctggtattggtggagttgccccaggtctggtcattggtggagttgccccaggtctggtcattggtggagttgcctcaggtctggtcattggtggacttgccccaggtctggtcattggtggacttgccccaggctggtcattggtggagtcgtccccaggtctggtcattggtggagttgccccaggtctggtcattggtggagttgccccaggctggtcattggtggagttgccccaggtctggtattgctggagttgtccccaggcctggtcattggtggagttgccccaggtctggtattggtggagttgccccaggtctggtcattggtggagttgccccaggctggtcattggtggagttgccccaggtctggtcattggtggagtcgtccccaggtctggtcattggtggagtcgtccccaggtctggtcattggtggacttgccccaggtctggtcattggtggacttgccccaggtctggtcattggtggagctgtcccaggctggtcattggtggagttgccccaggtctggtattggtggagttgtcccaggtctggtcattggtggagttgtccccaggtctggtcattggtggagttgccccaggtctggtcattggtggagttgtcccaggctggtcattggtggagttgtcccaggctggtcattggtggagttgtccccaggtctggtattggtggagttgtccccaggtctggtcattggtggagttgccccaggcctggtcattggtggagttgccccaggcctggtcattggtggagttgtccccaggtctggtcattggtggagttgtccccaggcctggtattggtggagttgccccaggtctggtattggtggagttgtccccaggcctggtcattggtggagttgccccaggcctggtcattggtggagttgtccccaggtctggtcattggtggagttgtcccaggctggtcattggtggagttgccccaggtctggtattggtggagttgtccccaggtctggtcattggtggagttgtccccaggtctggtcattggtgcagttgccccaggtctggtattggtggagttgtccccaggtctggtcattggtggagttgtccccaggcctggtcattggtggagttgtccccaggcctggtcattggtggagttgtccccaggcctggtcattggtggagttgtcccaggtctggtcattggtggagttgtcccaggctggtcattggtggagttgccccaggtctggtcattggtggagttgtcccaggtctggtcattggtggagttgtcccaggctggtcattggtggagttgccccaggtctggtcattggtggagttgtcccaggactggtcattggtgcagttgtcccaggcctggtcattggtgcagttgtccccaggcctggtcattggtgcagttgtcccaggctggtcattggtggagttgccccaggtctggtcattggtggagttgccccaggtctggtcattggtggagttgtcccaggtctggtcattggtggggttgtcccaggctcgtcattggtggagttgccccaggtctggtcattggtggagttgtcccaggtctggtcattggtgcagttgccccaggtctggtcattggtggagttgactcaggctggtcattggtggagttgccccaggcctggtcattggtggagttgtcccaggtctggtcattggtggagttgccccaggtctggtcattggtggagttgtcccaggactggtcattggtgcagttgccccaggcctggtcattggtgcagttgtcccaggcctggtcattggtgcagttgtccccaggcctggtcattggtggagttgtcccaggctggtcattggtggagttgccccaggtctggtcattggtggagttgccccaggtctggtcattggtggagttgtcccaggtctggtcattggtggggttgtcccaggctcgtcattggtggagttgccccaggtctggtcattggtggagttgtcccaggtctggtcattggtgcagttgccccaggtctggtcattggtggagttgactcaggctggtcattggtggagttgccccaggcctggtcattggtggagttgccccaggtctggtcattggtggagttgtccccaggtctggtattggtggagttgtccccaggtctggtattggtggagttgtccccaggcctggtcattggtggagttgtcccaggtctggtcattggtggagttgtcccaggctggtcattggtggagttgccccaggtctggtcattggtggagttgtcccaggtctggtcattggtggagttgtcccaggctggtcattggtggagttgccccaggtctggtcattggtggagttgtcccaggtctggtcattggtgcagttgccccaggtctggtcattggtggagttgtcccaggcctggtcattggtggagttgtcccaggtctggtcattggtggagttgccccaggtctggtcattggtggagttgccccaggtctggtcattggtgcagttgccccaggtctggtcattggtggagttgccccaggtctggtcattggtggagttgccccaggcctggtcattggtggagttgccccaggcctggtcattggtggagttgccccaggtctggtcattggtggagttgtccccaggtctggtattggtggagttgtccccaggtctggtattggtggagttgtccccaggcctggtcattggtggagttgtccccaggcctggtcattggtggagttgccccaggcctggtcattggtggagttgtccccaggtctggtcattggtggagttgtccccaggtctgggtattggtggacttgccccaggtctggttattggtggacttgccccaggtctggtcattggtggagttggtcccaggtctggtcattggtggagttgtcccaggtctggtcattggtgcagttgccccaggtctggtcattggtggagttgccccaggtctggtcattggtggactttccccaggtctggtcattggtggagttgccccaggcctggtcattggtggacttgccgcaggtctggtcattggtggagttgtccccaggtctggtcattggtggagttgtccccaggcctggtcattggtggagttgccccaggtctggtcattggtggagttgtcccaggtctggtcattggtggagttgtccgaggtctggtattggtggagttgtccccaggcctggttattggtggagttgccccaggtctggtattggtggagttgtccgaggtctggtattggtggagttgccccaggctggtcattggtggagttgcccaggctggtcattggtggacttgccccaggctggtcattggtggagttgtccgaggtctggtattggtggagttgccccaggtctggtattggtggagttgccccagttctggtattggtggagttgccccaggtctggtcattggtggacttgcctagggctggtcattggtggacttgcctagtgctggtcattggtggacttgccccaggtctggtcattggtggagttgccccaggtctggtcattggtggacttgccccaggctggtcattggtgtacttgccccaggtctggtcattggtggagttgccccaggtctggtcattggtggagttgtcccaggctggtgattggtggtgttgtccgaggtctggtattggtggagttgccccaggtctggtattggtggacttgcctagggctggtcattggtggacttgccccaggtctggtcattggtggagttgccccaggtctggtcattggtggacttgcctagggctggtcattggtggacttgcctagggctggtcattggtggacttgccccaggtctggtcattggtgaagttgccccaggtctggtcattggtggacttgccccaggctggtcattggcggacttgccccaggtctggtcattggtggagttgccccaggtctggtcattggtggagttgtcccaggtctggtcattggtggagttgtccccaggcctggtcattggtggagttgccccaggtctggtattggtggagttgccccaggtctggtattggtggagttgccccaggtctggtcattggtggagttgtcccaggctggtcattggtggacttgccacaggtatggccattggtggagttgccccaggctggtcattggtggacttgccccaggctggtcattggtggagttgtcccaggctggtcattggtggacttgccccaggtctggtcattggtggacttgccccaggctggtcattgggggagttgccccaggtctggtattggtggagttggcattcaattgtggagaaaccagtggaagggctcaggcaggaggattacggtcacagctgcgcattaaatgtctcacagggacctctgctggggatggactagagggaaagagactggaaatgtacaaactgaggatgcttgtgtagtggcccaggccgtagcagataaggtctgtgctggggctggagatgtgaggaaaaggcaattggatggccatgtgagagagggatattgatggaagaatcaatagaatcagatgactgactggatgtggttggtagaagtgggaggaagctagacgggcattggtttttttccaggtcataagaggcatgtgcatgcctgtcccacattagcccctgatcattaaacatgatctgtggatatgcttattcattcaatcttcagatgtcctgtataccaggccctgtccttggcacagaaaacacaattaaatctcatgtgtagcccatgtgcactcactcacagaacagctcccgactacctgtcagtcaaagcttttcacactttttcttaaatcccttcaatagatccccattacacttagaatacacccaaatgcctcagtctgtcctccaacgtcttctatgatttggctactgctcagatctctgacctcatctcctcacccactagcactctccgcattgcttgtaacttcagccacactggcctcattcttctccttgaaaatgctaatcacagcctcacctcaggacttcgtacactcattattcctccctgcttggaagtcctttccccacctccaactccacccgaccctaattctcagaagcctcaaactttttctcttcagagttgctttctctgacaacagtacctagtattcccttaccctggcgatactatcacatgctttatttcatattttttcatagcatttattgctactgttgtgccatttgttttttgtcttcttgtatcagaatgtaatcttcaaaagggctgggacaggccaggtgcggtggctcatgcctgtaagcccagcactttgagaggccaaggtgggtggatcacttgaggtcaggagttcgagaccagcctggccaacatggtgaaaccctatctccactaaaaatagaaaaattgactgggcatggtggtgggcccctatagtcccagctacttgggaggctgaggcaggagaatcacttgaacctggaaggtgaaggctgcactaagccaagatcatgccactgcactctagcttggtcgacagaacaagactctgtctcagaaaaaagaagagtgagggggatgctgagaccttttctttcctttttctttttttctttttttttgagacagagtcttgctttgtcacccaggctggagtacagtggcgtgatctcctgccttagcctcccatgtagctgggattacaggcacctgccaccacgcctggctaatttttgtatttttagtagagacgggattccaccatgttggccaggctggtctcaaacccctgacctcaagtgatccacccaccttggcctcccaaagttccgggattacaggcgtgagccactgcggcgcagctgggctgagaccttttcaaacatgttcttgtttgtatcttagagcctagaggtgttgtttgtatgaagtgcaaactgaaatatttccagaatgagtgagggcagaagggatgagtgacagtcttgcatattctaagaaaagggaagatgcattaacctgacatagtagggtgctctggagagggtgagagagaccagggagggctcccaggaaaaggtgacagctaagttgatgccgaaagggtcagggggaaattttcaagtccagaaagaaaagagcctggtttggagatgggattcacagcatgcgataaggtcctagaaaggagctaggacaggccagccatggtggctcacgcctgtaatcccagcacattgggaggccgaggcaggcaggtcacctgaggttaggagttcgagaccagactagccaacatggtgaaaccccgtctctattaaaaacacaaaaattagccaggcctggtggcaggcgcctgtaatcccagctactcaggaggctgaggcaggagaatcgcttgaacccgggaggcggaggttgcagtgagccgagatcgcaccattgcactccagcttgggcaacaagagcgaaactccatctcaaaaaaaaaaaaaaaggaaagaaaaaaagaaggcagctaagacagaggtcgacgccagtgcacctgtccatggtcctgaaacccagttgctctcaagtcaggatggttctattcagcttggaatgtaggtgactcttgcctactgtgctttaagaattacaaagcagatgtagttgagggggtgggaggagagtaagagagttggattgcagagatagaaaggaggaagggaggggagaaaaagagaaagggaaaataaggttatttttggagaaccagggctaatgcaaaatggccagaaagaaaaagcaacgataagaatgacttactacaaagaaaaaagaaaacaaaatctcttcctcggtggaaatatttctttctttctcatcagaccctggtcctgattctgcttatggagattggtatttatttatttatttatttacttattgaggcagtgtcttgctctgttgcccaggctggagtgcaatggtgcaatgtcggctcactgctacctttacctcttcggttcaagcaattctcatgcctcagcctcctgagtagctgggattacaaacgtgcaccaccatgcctggctaatttttttttgtatttttgtagagacggggtttcaccatgttggccaggctggtctcgaactcctgacctcaagtgatctgcccacctcagcctcccaaagtgctgagattacaggcatgagccaccgcacctggcagaatgtttgttatttagagctgtaatgtgaaacttggaccttaagtctggggttggagtgaactatgaggcaggtgttgtcagcaggaaccagatcacagacagcctggaacgacaggctgacttgtttctcctgtggacaatgaggagccaaggaagagttctgagcctggagggatagagtctgctttgggtttcagaaacggagatgaggattttggaacaatggtacaaacatacagaataaggcctgaaggccgggcacggtagctcacgcctgtaatcccagcactttgggaggctgaggttggcggatcacgaagtcaggggttcgagaccagcctggccaacatggtgaaaccccatctctactaaaaatacaaaaattagccgggcatggtggcgcacgtctgtaatctcagctactcaggaggctgaggcaggagaatcacttgaacccgggaggcagaggttgcagtgagctgagatggcgccattacaccactccaacctgggtgacacagtgagactccacctcaaaaaaaaaacaaaaaaaaaaaaaaaagagagaataaggcctgagctggggcaagggacttggggaagcaaaaagggggttagatttatgaggaattcaggaagtaaagcagacataatttgattgtccttcagtgaccatccctgatggatgagagagagagagggagagagagagaggaaaagaggagtgaagctgattcccctgcatctgagttaggcactgcagtgaatgtgatttttgggcttccttcaatcttcctttgctataaacctgctcatatttcaagaccaatctcaggtgcattttcaccatgtaatgcttcatgatcattctctttatttttgtattttttaattttttgagatggagtctcgctctgtcgcccaggctggagtgcagcagcataatctcagctcaccgcaacctccacctcccaggttcaagcgattctcctgtctcagcctcccgagtagctgggattacaggcgcccgccaccatgcctggctaatttttgtatttttagtagacagagggtttcaccatgttggccaggctggtctcaagtgatctgccctccttggcctcccaaagtgctgggattccaggcctgaaccaccacgcccagcctataatcactcccttactgcgtctcaacattatggaatactagaagttgaaagtgttatggaagttcagagcaagggaaaagttaattcttggaagggatagaggaatggtgggatttagagtgaatgggcttttctagatgttccagctgcatagcaagtatgttcttcatccattcaaagagaattgactacttgatggagaataataaaaaacaaggtggacttgtttctagcatcatggagttcctagcatctaactggggatggaggagatgtctaataaaaaagtaacaaatagataatataatgttagatggtgctacatgctacaaaaaaaaaaaaaaaaaaagcaggttaggaggagagtgatggggaggggttattatattatcccacccacctgaataatccaaggtttttaaatgtttttctctctatctctctatctttccctcctacctcaccatttttttttttttcttgagacagagtctcactctgtcacccaggctggagtgcaatggtgccatctctgctcactgcaacctctgccccctgggttcaagcaattcttctgcctcagcctcccgaatagctaggactacaggcgggcaccactacgccaggctaatttttttttaaatttgagacggagtctcactcttttgcccaggctggagtgcagtggctcaatctcaactcattgcaacctccacctcccaggtacacaagattctcctgcctcagcctcccgagtagctgggattgcaggtgcctgccaccacgctctgctaatttttctgtatttttagtagagacggggtttcactgtgttagccaggatggtcttgaactcctgacctcatgatctgcccacctaggcctcccaaagtgctgggattacaggcctgagccaccgcactgggccaatttttgtatttttagtagagatggtgtttcaccatgttggccaggctggtcttgaactcctgacctcaggtgatctgccctcagcctcccaaagtgttgggattataggtgtgagccactgtgcccggccccacctcactttttaaacacaccacacacagattttttttggctttagcatttgaaagtaaattgcatacatgttgatagttcatctctaaaattaagtgttagtatgcatcctttaaggctaagggtcgggtgctgtggcctcactttgggaggccgaggtgggcacattacttgagctcaggagttcaaaaccagcctgggcaacatggtaaaatcccgtctctccaaaaattaccaaaagtcagccaggcatggggcatgcacctgcagtcccagctactcaggagggtgagctgggaggatggcttgagcccaggaggcagaggtcgccataagctgagatcgtgccactacacttcagcctgggcaacagagccagatcttgtctctaaataaataaataaatagaagaataatacattcgtctacgtaactacaacaacattatcagacatggacgttttataattccataatacaatttaatacatttttaaactgtcctggctatttcaagaatgtcttttataactctttccctagaaccaggattcattctaggtccatgcatgacatttagttaataagtctcttttttggctgggcgcagtggctcatgcctataatcccagcactttgggaggccgagctgggcagaccatttgaggtcaggtgtttgagaccagcctgaccaacatggtgaaaccccatctctattaaaatacaaaaaagttagccaggtgtggtggtgcatgcctgtagtcccagctactcaggaagctgaggcaggagaatcgcttgaactcaggaggtggaggttgcagtgagctgagatcacaccactgcatccagcctaggtgacagagtaagactctgtctaaaaaaaaaaaaaaaaaaaaaaagaaaggaaaaaaagcctaattccactactatttgtttttaacaacgctgacttttttttttttttttttttgagatggagtctggctctgtcgcccaggttggagtgcagtggcacgatctcggctcactgcaagctccgcctcccaggtttgcgccattttcctgcctcagcctcccgagtagctgggactacaggcggccaccaccacgcccggctaattttttctatttttagtagagatggagtttcaccatgttagccaggatggtctcgatctcctgacctcgtgatccgcctgcctcagccttccaaagtgctgggattacaggcgtgagccactgtgcccggccagcactgactttttaaatatatctcattattaaaatataaaaagaagccaagcacagtgactcgagcctgtagtattagctactctggaggctgaggtggaagaatcgctttgaacccaggagatggaggctgcagtgagctatgatggtaccactgcactccagcctgggcaacagagtaaggccctgtctaaaaaaaaaaaaaaaaaaaagaattaaaaaataaaataaaatatagaaagaatagtataatgaaattcatggatcctgcactcagtttcaacaattaccaacatatggcaaatctgtttttagtcatattgccatgtcctcttctgcatttcactacattattttaaagccagtctcagacatcatttgattcacagatatttcagtatatctctgagttataagtagtcttttatttactataaccacaatcccatgatcaagcccaagcaactaagaataattacttaatattatctcatatctagttaatgctcactcttccccattggcctcataaatgcctctttctagttcatttgttgcaaatccagatccaagttccacatgtacattgagttgatagatctctgaagcctctttcaacctaaaacggtccctctcctatttttttctggccatttatttttttgagaaatttgcatttttgttatgtggaattcccacattgcagttttccaatggaatcttctgttgtcgtttaatatgttcatctatttcagtgttttcttttctctctcctttttttttttttttttgagactgagttccgctcttgtcgtccaggcactgcaacctccgcctcccaggttaaagcgattctctggcctcagcctcccgagtaactgggattacaggcatctgccatcacgcccggctaattttgtattttaatagagatggggtttcgccatgttggccaggctggtctcaaactcctgacctcaggtgatccgcccgcattggcctcccaaagtgctgggattacagcactttgtgcgtgagccactgagcccagccttttctttttttgagacagagtctcactctgtcacccaggctggagtgcagtggtgcaatctcggctcactgcaacctccacctcctgggttctgcaacctccacctcctgggttcaagtgattctccagcctcagcctcctgagtagctgggattacaggtgcccgccaccacgcctggccaatttttttttttttttttttttgagatggactctcgctctgtcaccaggctggagtgcagtggtgcggtctcggctcgctgcaacctctgcctcccaggttcatgcaattctcctgcctcagcctcctgagtagctgggactataggcgcccaacaccacacctggctaatttttgtatttttagtagagagggggtttcaccatgttttggacaggctggtctcaaactcctgacctcaggtgatccacccgcctcagcctcccagagtgctgagattacaggtgtgagccaccacactcagcctattcctgtgttttcttgtaagccaagatctaaaagaagcttagatggatgcaggtttgatttttttttttttttggcaagaacactttatacataggtggtgctattcacatcctgctgtgtctattacatcaagagacacagattgtctgattgtctctctttttgagatattagagttgatcactggtttgagtgtcattagcttgctccatgtcatcgtttttctgaagactgagggacagggtatcctggtgaatgtcctgcatcttgggtttattgtttaatttttatttatttatttatttatttttgatacagagtctcgctttgtcacccaggctggagtgcaatggcgcaatctcagctcattgcaacctccatctcccgggttcaaacaattctcgtgcctcagcctcccaagtagctgggattacaggcctgcaccaccacgcccggctaattttgtatttttagtagagacagggtttctccatgttagtcaggctggtctcaaactcctgacctcaggtgatacacccacctcagcctcccaaagtgctgggatgacaggcgtgagccactgctcccagctgcatcttgaatttatttgtttcttcatggtaacacttcatttgttcctctttccttgtattttctgtaacctggaagttctgtctagactagaggcttgataacattcacgttaaacatcattggcaagaaaagtcagaggtgccgctgcatactttgtatcacgttactccagggagcaaataatgtcaggttgtcccacagtgagtggtaccagcttgaacccttggtaaagatggtgtccatcagagctccccatggaaaaggtaggtttttctttttacaatgaaaaagcaaggccaggcacagtggctcatgcctgtaatcctagcagtttgggattccgaggcgagaggattgcttgagcctaagagtttgagaccagcgtggtcaacattgagaccctgtctcttaaaaaaaaaaaaaaattagccaggtgtggtggcgcatgcctgttgtcccagctactccagaggctgagacaggaggatcacttgagcccaggagtttgaggctgcagtgagccatgatcatgccattgcactccagcccgggccatagagcgagaccccatctcaatagataaataagtaaatgaaatactagtgtgcaggtaatactttagcattttgaaaaaaaaaaatcttggtttgggatactcgtattttacattttttattttggagaaaatttaagactacaggacgcttgtaaaaataatacaatgaactctcatatccttcacctagcccagtttttcaacattttacaacatttgcctttctgtctctctctctctccatatatatatatagatctatatacacatatatgtatacacatattacatatacatatatacctatgtatacacacgttatatatacatatatacacacaaatatatgcatatgtgtgcacaaaaaatatatatgtacacacattggtgcaaccacttgaatataagttgcaaacacttcactagttcagcaagtatttcctaagaacaagggcattcttttacctaaccacagtacaataatcaaattcaggaagtttaaggtctataaaatactatagctaatatctagtcctacatttaaatttcaccaatgtcccaatactgtctttttttttttttttaattgagacagtcttgctttgtcacccaggctggagtgcagtggctcaatcttggttcactgcaacctctgccttctgggttacagggattcttgtgcctcagcctcccaaatagctggaactacaggctaatgccaccacgcctggctaatttttgtgtttttagtagagacaaggtttcaccatgtgggtcaggctggtctcaaactcctaagctcaagtgatccactcacctcagcctcccaaactactgggattataggcgtgagccaccgcccccaccctccaatactgtctttttttttttttttttttttttgagttggagttttgctcttgtacccaggctggagtgcaatggcgcgatctcggctcactgcaaccttctgcctcctgggttcaagcgattctcctgcctcagcctcccaagtagctgggattacaggcacccaccaccatgcccagctaatttttgtatttttagtagagacaggatttctccatgttggccaggctgatctcgaactcctgacctcaagtgatccacctgccttggcctcccaaagtgctgggattataggcgtgaaccaccacgcctggcctaatgctatctttttactgttactttttcctgattcagaatccaatctaagatcacgctttgcatttccctattgtgtctctttagtctcctttcatttttttttttttttaatacgtggaggatgccatgtgaacctttcattttttatggagctctgctgcctttttttttctttttcaatctttcatgttgacgtttttgaagagtgcagccagttgggctgtagagtgtcccactgtcctcatgagtggattcaggttacgcattctcagcaggaacacgacataaaggagggagtggtttgctcagctctcttctctggaggcccgtggtgtaggtctgccctgttgctggtgatgttaactgcgatcacttggttaaggcagtatctgccaggttctttcaccataaaggaagctttttatctctgtaataattaatagatcttctgtggggagattctgtcatccagcaatcgagcatcccctcgtgactcttgcctgaatctaacattactactaggattgcagaatggtgttttcttctaactctattattccacctacatggataaattggtgtgctactgaaaagaactttctcttttttcttattttaaatatgtatcagtgtggactcatgtattttattctattttgtttttaatttagtttttgtttttttgagacggagtctcactctgtcgcccaggctggattgcagtggtgggatctcggctcactgcaacctctgcctcctgggttcaagcaattcttgtgcttcagcctcccaggtagctgggattacaggcacccaccaccatgcctggctaatttttgtatttttagtagagatcaggtttcaccatgttggccaggctggtctcaaactcctgaccttaagtgatctgcccaccttggcctcccaaaatgcagagattataggcatgagccaccgtgcccagcctaacttaattgagttttttgagacagtctccctctgtcacccaggcgggagtgcagtggtgcagtcatagctcactgcagccttgaactcctaggctcgagggatcctccctcctgagcctcccaagtagctaagacaacaggaactaattatttatttttagtagagatggggtctcactatgttgtccaggctggtcttgagctgctgacctcaagtgatctgcccacctcggcctcccgaggtgcggagattccactcatgagccacggtgcccagcctccattatttttcaacggcaagtcatgctgcgataaatcagcctgtgcatgtgtggtttcccatcacgggagagatatcctcaggataaattcctggaagtgggattgctgggttaaaggacagatccgtgtgtgattttgttagatgctactaaatcccctttcacgtggcggcaccgttttgcattcccaccagcaatgtagaagaacgtccattctctcagcctccccaaaagagtgtgctgtgaagcttttaaacttctgactacccggttgatgagaagtggtagctcatcatatttttcatttgcatttctcaaattttgagtgagggaaatctacttttttcaacagggagatcataaaagtctcctccccccttcccttccctcccctcccctcccctcccctcccctccttctcggagttttgctcttgttgcccaggctggagtgcagtggcacgatcttgactcattgcaacctctgcttcctgggttcaagtaatcctcctgcctcagcatcccgagtagctggggttacgagtgtgtgccatcgcacccagctaatttttgtatttttagtagagacgaggtttcaccacggtggccaggctggtctgaaacccctggtctcaagtgatcctttcacctgggcctcccaaagtgctgggattacaggcttaagccactgcgcctggcccatagaaggtctttctaaagaggcaacaagtgaggagagatctaagtgacagaaatagacatggggaaatctgggggaagagcattccaggtagaaggaatggcaagaccaaaggccctgaggcagaagtgagcttgaggagttcaaggaagagcaagaaagttaggtgttctaggccgagtgtggtggctcacgcttgtaatcccagcactttgggaggccaaggtggaagaactgcttgagctcaggagttcgagaccagcctgggcaacatggggagaccctgtctctacaaaaaaatgcaaaagttagccccgcatggtggtgcatgcctgttgtcccagctactcatgagtctgaggtgtgaggattgcttgagccagggaggtggaggctgcagtgagctatgattgcaccaatgcactcctgcctggacaacagagcaagaccctgtcccaaaaagaaaaaaagtaaagaaagttaggtggtctaagaaaaagaaacaaggagaaactgatcagagatggtgtgggcaggtaccggaccatttatatactgcagtctaagaggtcagcgaagttttctgtaaagagccaaataataaataccttcagctttattggccacccagtctctcttgtaactgctcagccttgtggttgtagcaaaaaaccagtcacaggcaatatgtaaacaaatgggtgtggctgtgttccactatcatttgtagaaaccaaaatttaaaattaatgtactttaaaaagttgagatataaagccaggcacagtggctcacgcctgtaatcccagcactctgggagatgaggtgtgcagatcacttgagatcaggagttcgagaccagcctgggcaacatggcaaaaccctgtctctgcaaaaaatacaaaaaattagccgggcgtggtggtgtgcacctgtagtcccagctactagggaggctgaggtgggaggatcacttgagcctgggaagtgaaggctgcagtgagccatgattgtcccagtgctctccagcctgggtgacagagcaagaccctgtcttcaaaacaaaacaaaacaaaacaaaaaaggccgggtgtggtggctcacacctgtaatcccagcactttgggaggccaaggtgggcagatcacttaaggtcaggagtttgagaccagcctggtcaacattgtgaagccctgtctctactaaaaatacaaaaattagccaggcatggtggcgggtgcctgttaattccagctacgcaggaggctgaggcaggagaatcgcttgagtccaggaggcagaggttgcggtgagccgagattgcaccactacactccagcctaggtgacagagcaagaatctgtctcaaaaaattccaaaaaacaaaaaacaaaattgagatgtaattcacatactataaatttcatataattcagtgatgtttcagtacatccacaaggttgtgcaaccatctccattagctaatttcacaacattttcattattctcaaaagaaacctcacacaccttagcagccagacacaatttccccctccatcctattccctggcaaccactaatctactttctgtctctgtggatttgcctattctggacattgcatataaatggaatcacacaatatgtgatattttgcatctggcttcttttagcttgctttctaggttcatccctatggtagcatgaatcagtatatcgttcccttttttggctgaatagtattcctgtatatggatataccacattttgtttatccattcatcagctgatgggcatttgggctgtttccgctttttggctattacgcataacgctgttacaaacatccgtgtatgcgtttttgtatgaacatatgtttccacttctcttggggacatacctaggagtggaattgctgggtcatatgataattctatctttaactttttgaggcgctgccaaatgaaattcatatactttttatgtgccacaaaataccagtcttgttttgatttttaacatcatttacttatgtgaaagccattcttagctggtgggccatacacaatgagggggtgagctgggtttcgtccatggaccatggtttgccgaccaccggtgtagacagtggaaggaatttgggcttattctgtgtgtggcacacagaatgtaggattctaggggaagaggttgatagggattagttagatacatttaaggcagggaactttatagcctccttaagccactcttggcatggttactgtttagaggaaatttcatctggagaaaatgataatcgcctcttagaaattctcagattggacctctcctctgcacactgtccgtatgctctatttcctcaattgtaaatggtgttaaaaatgtacctccttcaaagaggtgttgtgaagtttgaatgaatgtatatatatacacaacaccaagaacagtgcctggcacagaccaagacctatataagtcgttgctattattattgctattgttgcaattattatccacacagcctcagctcaggcctcatcctcttcgccctggaatatgtctccctccagtctgttcccagcatcaaccagcccccaaagtttcttctaacactgggatctggccctgtccttcctctgctacaaactttgtgtagctccctagcacccttggcgtcaacacccagctcctgggcccggcattcgaggctcaccatggctataccttcccctttctctaacctcatttcttgtggctacagcttatgttacagctacatgggtggaccagctctattttccctccttccgaaacctttgcccatgctgtgcactctgccagtgtgcccttattcttctctgggcctcatcctttaaggccgggcgcggtggctcaaacctgtaatcttagcatttggggaggccgaggtgggtggatcacctgaggtcaggagtttgagaccagcctggccaacatggtgaaaccccgtctctactaaaaatataaaaaaaaaaattagtcgggagtggtggcgggcgcctgtaatcccagctacttgggaggctgaggcaggagaatcgcttgaacctgggaggttgaaggttgcggtgagccgagatcgggccactgcactccagcccaggccacagagtgagactccatttcaaaaaaaaaaaaagagagaaaagaaaagaagacttgaacaaagaaatctttccttcatttctcttgcccctgccccaggcaggtttggcactccttccagagtcccacacagcgtgctacttccttgtagcacctatcaccttatatgtgacttaatcagtgtgttcctattttccttctccaattgtattgtgagctcctggatggcagatttagggggataaagggggaggtggttgttgattcatctctgggctccctgcacccaaccaaggcccagcatacaaggggcttcagggaagttagtccaggacagaatggggaggaggggaaggcagtgaggtggggctggggctgggaaaaggggcccacttctaatggacgagggcaccccctctgctcccctaggcctctccttggtggtgggcttggttctttacatctccagcatcaacgacgaggtcatgaacaggcccagcagctctgagcagtattttcattatcgctacgggtggtcttttgccttcgccgcttcctccttcctactcaaagaggtgacgtccgtgggacctagactctagagttctgaatggagagaggtcttgggggcctggttcctgagtccaggaggaaggagaggctggagatgcagactctggcgtcagagggaggtggtagctgagggtctaacccctgggtcctggaggaagaggggtctgagagctccaacttttgggatcctgggggaggaggggtctggagactgggactcctgggtcttgagggaggggccaacctgagggcttggactcctgaggtcccggggaaagagagggctggagccctgatcctgggtcctgggataggaaggggcttggggtggggactctgagtcctggagtgagaggagatgagtcggggtccggggatgcgcaggggggcgcccctgggactctgaccttgccttgccgcagggggccggcgtgatgtccgtgtacctgttcaccaagcgctacgcggaggaggagatgtaccgtccacacccggccttctaccgcccgcgtctcagcgactgctccgactactcgggccagttcctgcagcccgaggcgtggcgccgcggccggagcccctccgacatctccagcgacgtgtccatccaaatgacgcagaactaccctcccgccatcaagtacccggaccacctgcacatctccacctcgccctgctgaggcccgcccctcggagctccccctgcctcctcctcctcctcgtcttaggggggtctccctgcaatgcagcgcccccttccgtcctcgggactcctcgctcccacccggaggaggctgcgccagctttaggccccgccctcctcccaatggctccgcccacagactcccttatttcaatggccgcgccctcttttcccgacctctccttttcattggtccctctcactcccaaatgactcctccccttcgttggcccgcccctttcctctggcccctcctctccaagaaaattagctcctccctcgttctccacctgctctgagctgggagcagccagaggcggtgcaagcgcccagctccccagagctccccaacctcggacctcaccgcaggggcgctgggctggagagcaggttcgggcagccgtcgggaataccgaccatcctcttctcccttctaacctgggcttcctttttccctgcctaatctcacctcctgacctgctgggtcctccggtgcagtgggagggccggcttgctccacccgcagccccggggtggcgtagggaagggggctggaagccacgggtacggttaacctggcccttccctccccatctcccctacttccctggaaggtcccattctttctcaccggctgggctcttttctgcttcctgaaggttacctgccttttagggggctcttgtctaaaggatcttcttgctttctcagctatccttggcttctttttcgtcttcctcctcctttaactctttctctcctttcctcccttcacccgttcgtcccaagcccttgggtgcatcccgccctaggcgcacaccagacggccagaatggggaccctagggtggagggaattcccccacgccatctccgcacctgtgcccgcctctcccccctcgaggccccgtcgagggagggaggggcagtagcgggggtcgacaccccccccaaacctctaagtcttccattttctggctctcctcctcattgacgtccctcttcccccctcagaaccccaactctggcctctttcaagggcccgtccgccccgttggacagattttggggggagaggaggtcaccaggaactcgcccacccccccttattagggaaagaggggcgaggtagcacagtgctgtacacggaaccagaatggcccccggggtggggggaggggggcaggggagggacgggggcttttagtttgcatcttaggtgggaggggggaggggggacccgccgcagttaacctgactttacgcagcgatttttaacgaggctggggggaggggggcactggggtggggacagggtggggtggggggcctggctctgttatttaccgtgtatcatatgtaaatatcgacagaaacttcaataaactttatttcaaacacgtctccgcctgcccggagggaagggattggatagagggggcttagtctgggtctctgcttctagggttgcaggcctaaagtactgcagaatgacgttagatgggtcgttgttaaatgacttaatcatcatcattatcaacggcagcgctttatacttcagtccgtgtaaagcatgcaggaccgtaaatgatactggtcaggatcaataaacgctttctcctggtattattatgaccacgtagagtactgttactatgactcggcttccttcgacattcattgcttcttttaacttttcccccaagcctgcacggtcaatttattggcctcattttgcagataggtccagagaggtgaagtgacgtatccaagatcacacaggtggaagttggcagagccatttgctaaagccaagtttaggcctggtgcggtgactcacgcttgtaatcccagcactttgggaggtcaagctggggggatcacttgaggtcaggagttcgagaccagcccagccaacatggcgaaaccctgtctctactaaaaacacaaaaaaattagctggccacggtggctcacgcctgtaatcccagctattcgggaggctgaagcagagaatcgcttgaacttgggaggcggaggctgcagtgagccgagtgcactgcacgccagcctgggcgacagagtgagactccatctcaaaataataataaaaccaagtttatctggttctgaagctcaggcttcctcccccttgcactaggcagtggtgggttttcccaatgcttggctcagtccctctgttaagaaatgactgctaccatttactgcacacctaccctgagccagacgccttccttccttacatgatctcattagacattcacagcaaccctgtatgtaggaattatcaccccatttttgcaggtgaaggaggcaggctcggaaagtgggtgccacaatctgcagtctcacccactatactgagagactgagaacagcctaaatgtttgataagcttatttttgcagcgtattgtaaaggaaacaccgtgccagatcttcccttctttgccttgtctagatttggcctcttaaggatccatcagaataacttttgctgttacagtcacaactgttaacaaccaagacacatttatcaggtcatcattagggtatcagacaccgcactaagcacttttttaaaaaaaaatagagacagggtatccctgtgttgcccaggttggtcttgagctcctgggctcaagggatcctcctgcctcggcctccgaaagtgctagaattacaggcatgagccaccctacccagcctgcactaggcacttttgatttattagctcattgaatccttccaaccatcctgtgaatcaggcatcccaattagccccattttatagatgaagaaaccgaggctcagggaagtgaggccacccagctggtaagatgcggaggagaattcatgcccagcctgtctgacctcagagcccacactcttagctgctataatttactactatggatttggtgcaaactcattctgtgaccttgagcaaatctttgaatctctggggcttcagtttctttttctataaaaaaataaaaaaataccgagggcactggttggtttagaaggattccaaatccctctggaatagggaggttggtgggggtaagttagcaggaaagagttctgaatcagcaggactggactcccggagggaaatattctaagtcattttcaataatttcaccaatttctggaggtcatgcttgagattcgggatggcaaatcatgtttcagcttcgttgtcaaaactaagtgattcgtacgggctgcttggagcccggtgttagaaggattctgaacatctgctcagtgggaaagagtgttgccattgattggtgctgtctgccgtgctgctcaattggtgctgtctgccttgcctgcaggatgggctgtggtgacgcaaatgctagatacttgctaacactatggggaagttaacaacctaaaatcctaagggttgtgttcttttaaaaaatcaagctagttcttttgtttattaaactttgaaaatggaatgtaatcccacagttcgagattggtgagttttttgatttgttttaaagaaatgctgtgaaaagttccacctttatttatccaaagtaagtcaggatgtcctaacattctgaaatcctcctcttcctgaggcattattagttttcaatgtataatttcaggaatactctatgcatattcaagcatatatgcatgtgtttaaatccacatacagatgagtatgtggtatacatatttttattttatacatttatcatgtaatgcacatagttctgggccttccagtttcaaatgagaatgcatggggctcatttagtatgttatataactctactgttttccaaggctgcttaataacaattgtttgcataaattaattgcgtaatttattgagtgcttacatgccagccactttgtgtttcagtcctaagccttttacattctgtaacctcaggaggtttagtactcttagtatcattctcactttataaatgagatcctgagacacagagagggtaattagctttctcctggtcacacagctagtaagcggtcaagctaaaatttgaatcctgggagtctcttgtgtcgacaatacttatccgctaagctgtatacctttgtgtgtgtgtgtgtgtatatatactgccctccttggcctcccaaagtgttggaattacagttgtgggccaccatgcctggccctctgtgtatattgaagccacctggttccatctatttatctctctctctctctctctctatatatatatatattttttttttttttttttttttttgagatggagtcttgctctgttgtccaggctggagtgcagtggtgccatcttgactcactgcaacctctgccttctgggttcaagcaattctcctgcctcagcctcccgaatacctaggactacaggcacacaccgccacgcctggctaattttttgtattttagtagaggcggggtttcaccgtgttgcccaggctggctgtgaactcctgagctcaggcaatccacctgcctcggcctcccaaagtgctgggattacaggcgtgagctactgtgcccggctttttttttttaaacgaatctcgctctgttgcccaggctggagagcagtggcatgatctcggctcactgaaacctccaagtcctgggttcaagcgattctcctgcctcagcccccagagtagctgggattacaggtacacgccaccactcccagctaattttgtatttttagtagagacagggtttcgccatgttggccaggctggtctcaaactcctgacctcaggtgatctgccctccttggcctcccaatgtgctggaattacaggtgtgggccaccatgcctggccctctgtgtatattgaagccacctggttccatctgtttatcaatgacctatatctccctattgcccttagaagtaaatctaagctcctcacctatgtccttttgccaagagcacaagtctcaacatatgccgtccccactgctgcctcctgcagactgaagttgtcttccctaccattcccagctccttgctgttctgagggtttccttccgaggaatccccttccatctctcagccatatggcaaaacctctatccactctttttttctttctgagacagggtcttgctctgtcacccaggctggagtgcagtggcacaatcttggttcactgcagccttgacttcccaggctcaagccatcctcccacctcagcctccccggtagctgagaccacaggcaagcaccaccagacctggctatttttttttttttttttgtatttttggtagagaaggggtctcatcatgttgcccaggctggtctcaaactcctgagctcaagcaatccgctgacctgagcctcccgaagtgctgagattgccggcatcagccaccacaccgggttctgtccactcttgagattcaacttacatgctccttccaccaggaagccttccctgagctcccaagcctgcatcagggtctagctaaatgcttccaccctaccctatactgccccccttagaccacactggtttacaggacaataccacataccagtgcttttcaaaatgtgtcctggggagctggaacatccctgagactcatttaggaagtccacaaggtcaaaggcatttttatcgtaatactaagatattttcctttttttcattcttattctctcatgagtgtatagagtctggaggcttcacaggaagtaagaacacgactgaacacagaagcagatatgagactgactttcttctgttgagtcaaacgttaaatctattttaaaaaatataaaccaataccattatataattttttaattttggaaactagttatttttattaaagtaagttgcttatgtaaatatacaataagctgattattttacttaaatacatattttagattttcttctcagtttgaattgcaaatatgcaaaatatcgatagacatagcacaaatttgaaaagctctttggggtcccctacaattttctttttttttaattttatttttagagacaagatcttgctctgttgcccaagctgaagtgcagtggggttatcatagctcattgcaaccttgaactcccaggttcaagcaatcctcccatctcagcctcctgagtagcaaatactacaggtgagcaccaccatgcccagctagtattttaatttttttttgtaaagatggagtctcaaactcacggcctcaaatgatcctctcacctcggtctcccgaagtgttgggactacaagtgtgagccaccagctctctacagttaagtgtacggagggatcctgcattcaaaggtttcaatgctaatgctgtatgtcacagagttagtaagatttacctaattcctctaatgactatgtagtggtccattgcagagaggtaatttatgtgaacaataaactcattttaattacgaatttatttatttatttattattcttaatttttaatttttttctattttaaatttttttctatttctataataaattgattaatttatttgagacggagtttcacttttgtcacccaggctagagtgcaatggcacgatctctgctcactgcaacctccgcctcccaggttcaagtgattctcttgtctcagcttcccaagtagctgggattacaggcatgtgctaccacgcccggctgattttttgtatttttagtagagatggggtttcaccatgttggccaggctggtctcaaacccctgacctcaggtgatctgcccgctttggcctcccaaagtgctggggttacaggagtgaggcaccgtgcctggccctgaaatgtaatactcagtcatgatttaaaagtttcagcatcagagaagggtataaagaaagtagcttttggctgggcatggtgactcacgtctgtaatcccagcactttggggggccaaggcgggtggatcacttgaggtaaggagtttgagaccagcctggccaacctagtgaaatcccatgacatagtctctactaaaaatacaaaattagccgggcgtggtggcacatgcctctgatcccagctacttgggaggctgaggcaggagaattgcttgaaccccgggaggcagaggttacagtgagccgagattcagcctcagcaacaagagtgaaactccgtctcaaaaaaaaaaaaaaaaaaaaaaaaagaaaaagaaaaagagaagaaaaaagaaagtagctttctcttcactcttctcaattccagcctcatttcccagagagagtgactgttcccactttcttcctttaggacagtggctctcaactggaagtcatgttgcccccaggttgcatttggcaatgtccagagatatttttgtttttgcttttttttgtttgtttgttttttgttttgagacggaatcttgctctgtcgcccaggctggagttcagtggctcagtctcggctcactgcaaactctgcctcccgggttcacgccattctcctgcctcagcctcccgagtagctgggactacaggcgcccgccaccacgcccggctaattttttgtatttttagtagagacggggtatcaccatgttatccaggatggtctcgatctcctgacctcgtgatccgcctgcctcggcctcccagagtgctgggattacaagcgtgagccaccgcgcccggctgtccagagatatttttggatgtcacaactcagggctggggggagtgaggtgctacgggaacctagcaagttctggaatagaccctgaaatgtgcaggaaggccacccatggcaaagaatcatctggtctccgatgtgactggtgcgacagtgattgagaaagcctgtgccagacttttatctagaaatcaataaatagaaatatctttatgaagatatttcttttgcggctgggcgcagtggcttacgcctgtaatcccagcactttgggaggccaaatcaggtggatcatgaggtcaggagttcgagaacagcctgaccaacatggtgaaaccctgtctctactaaaaatacaaaaaaaattagctgggggtggtggcgggcacctgtaaccccagctactcgggaggctgtggcagaagaatcatttgaacccgggaggcggaggttgcagtgagccaagatcacgccattgcactccagcctgggcaacagggcaagactccgtctaaaaaaaaaaaaaaaaaaaaaaaatatatatatatatatatatatatatatatatatatatatatatatatatttctttttttcttttttacctttatttttatggacacaaatgagtttttcctaaattgattcataagctgtgattctttttttaatttttattttgagacagggtctttctctgtcgcttgggctggatggagtgcagtggcatgaccttggctcactgcagcctcaacctcctgagctcaaggcatcctcccacctcagcttcctgaggagctaggactacactcctggttcattttttaagaattattttttggcctggcatggtggctcatccctgtaatcctagcactttgggaggccaaggcgggtggatcacctgaggtcaggagttcaagaccagcctggccaacatggtgaaacccccatctctactaaaaatacaaaaaattagccggatgtggtggcggacgcctgtaatcccagctactcaggaaactgaggcaggagattcacttgaacctgggaggtggaggttgcagtgagccaagatcgcgctactgtactccagcctgggcaataaaagcaaaactccatctcaaaaaaatatatatattttttgtagagtcgggggcctccctatgttgcccaggctgggctcaagcaatcctcccgcctcagcttcccgaagtgctgggattacaggcatgagccacggcgctctgccagctgtgataatctgcaggagattagggacctcttggagagtcagataaaagctacggacccccaggaaaaaaatacttatactcacaatattctgtacataatatcaggggcttcagtgacatcccattagctctggcagaatgccttggatgtgtgatttcgaatcacagtctcaacaagagagagatcactaacggtatccctcttccccttctacagatgagagaatgagagaaggaagctgcagtgagaatcaagctttggatccgggttccttggggaggcaaagaagagccggagttggaactccagccacctggctccccagcgttggaatatttccacttcaccctgaatgaggacgtttaagaaacgctgatcgacgcttcctggtacagcaggaagacatgccaccaccaccctgttcctcttgaggaaacacaaaggccccagctgttgttgatgagaaacactcgcgcacctgggaaaaaccacacactcaggatgtgaggcagggagaagggttggatagggacaagaggttggaactggctgcgtagagggtggagaccctagaatatgtatccactcattccctgactcattcattttctcattcattcgttcattcattcattcatttgttcatcatccctggacccgagggctcctgtccatcagggctgagctgggatctaggggacacggaagtaaatcagacccgtgcctgtccttgaacagctccggcaccagtgcggagaagaccgacccacatgtcaatcacaatatagccttgctgtggctttaaggagccagtgcaggcctggtgggagcactgatgtagaccctgatggaggcttgggaggtcagggaaggcttcctggaggaaggagcgtgtaagttgaatctcaagagtggatagtgccaggtgcagtggctctgtaatcccagcattttgggaggctgaggtgggcggatcgcttgagctcaggagtttgagaccagcctgggcaacatgacgagacccccttctctaccaaaaatacaaaaaaaaaaaaaaaaaaaaaaatagccgggtgtggtggtgcttgcctgtggtctcagctactggggaggaagaagtgggaggatggcttgagcctgggaagtcaaggctgcagtgaaccaagattccaccactgcactccagcctgggtgacagagcaagaccctgtctcagaaagaaaaaaagagtggatagagggtttgccatatggctgagatggaaggggattccacggaagaaaaccacccaggaaaccctcagaacaggaaggagctgggaatggtagggaagacaccttcagtctgcaggaggcagcaatgggggcggcatacgatgagacttgtgctcttggcaaaaggacataggtgaggagcttagatttactcctaagggcaatagggagacataggagaattttattttattttattttttattttttatttttttgagatggagtcttgctctgtcgcccaggctggagtgcagtggcgtgatcttggctcactgcaagctccgcctcccgggttcacacaattcttctgcctcagcctcccgagtagctgggactacaggcgcccgccacctcgcccggctatttttttttgaattttttagtagagacgggggttcatcgtgttagccaggatggtctcgatctcctgacctcgtgatccgcctgcctcagcctcccaaagtgctgggattacaggcatgagccaccgcgcccggccgagaattttatgttattattattttttgggagacggagtcttgctgttgcccaggctggaatatagtggcacagtcttggctcactgcaacctccgcctcccaggtttaagtgattcttctgccttagcctcccagggagctgggattacaggtgtgcggcagcacacctgtatttttagtagagacagggtttcactatgttggccaggctggtctcgaacccctggcctcaagtgatccgcctgccttggcctcccaaagtgctgggattacaggcgtgagccactgcgcctggtgagctctgggtctcacaaggctgaagttaagatgccggctggctgtgtcctctgctggggatttggctagggagagaactacttccaacctcccacaggttgagcagaattcatttccttgtagttgtttggctgaggtctctgttttctagttagcagttgccactcactctcaggtctttgccatgacaagacagtttgcttcctcagggttctcagcaactcctttgctttggttatttctgacgtcttgatcctttcctaagagatcacctgattaggccaggcccacctgggataatttcttttcttttctttctttttttttttgagacggagtctcactgttgcccaggttggagtgcagtggcgcgatctcggctcactgcaggctccgcacccccggggttcatgccattctcctgcctcagcctcccgagtagctgggacttcaggcacccgctaccttgcctggctaattttttgtatttttagtagagacggggtttcaccgtgttagccaggttggtctcaatctcctgacctcgtgatccgcccacctcagcctcccaaagtgctgggattacagacgtaagccactgcgcccagccggataatttcttttttaatgaagtcaactgattagggaccttaattatatttacaaaatcccataccttgccatataatgtcacataatcatggggactgcatcacctcctagtgacagctcttgtccacacccaagggaaggagattctcttgggtgtgtacaccaggcggtgggaatcttggaggttattttaaaattctgcctatcacagttggaagtgaggaccgaggaccttctcaagggaagggattagcaaacctatctctaagtctgcaggctctaggtctctgggtcaagcccagcagaggccttggctaatgtgaaatgaatatgtgagcaaatgtagaaatgagatcttataaaagtctacaacctgcttcttctgtgacaccccttctgaaggggccttccatgagctgaaggagtgatcagtgggttcaatactcccatccatctatctttctttctttctttctttcttttttttttgagacagagtctcactctgtcgcccaggctggagtgcagtggcatgatctcagctcactgcaagctccacctcctgggttcacgccattctcctgcctcagcctcccgagtagctgggacttcaggcgcctgccaccacgcccggctaattttttttattttttatttttaatagagacggggtttcaccgtgttagtcgggatggtctcgatctcctgacctcgtgatctgcccgccttggcctcccaaagtgctgggtttacaggcatgagccactgcgcccggctttttttttttttgagacagagtttcactcttgttgtccaggctggagtacagtggcacgatcttggctcactgcaacttccacctcccaggttcaagcgattctcctgcctcagcctcccaagtagctgggattacaggcgtgcaccaccatgcctagctaatttttgtatttttagtagagacggggtttcaccatgttggccagcctggtctcgaaatcacgacctcaggtgatctgcccgcctcggcctcccaaagtgctgggattacaggcgtggaccaccacacctggtaatactcccatctttcaaaatgaagtgaagagatgctatctcattccttaaactcattctacaagttcactgccaggtatgtgcccaagagatatgaaaacatatgtctacacaaaaatgtgcacacaaatgttcacagcagcattatttgtaataaccaaaatgtggaagaaactcaaatgttcattgatacatgaatgaataaataaaatgtggtatctcccgctataccatggaatgttattctgccataaaatggaatgaagcactggctcatgctacaacatggatgaaccttaaagacattacttacttagcctgaaagcagccagacacaaagaaccatacgttgtatgattcaatttctatgaaatgtctagaatgggaaaatctataccgacagaaagtacattagtgattgcctagggctggagtgggtgcttagattgggggtgatggctaaggagtacacagtatctccttggactaatgaaaatattctaaaagtgatctgaagttgatgattgcacagctctgtacaattaaaagccgttgaattgtacactttaagtgggtgaattgcatgatatgtgaattcgatctcaataaagctgtgaaaaaaagagatatactctttagttgttgaaataaatcatgatgtaatcatgcatcacttagtgtcacaaaattaccaatagaagaactaacacttgaggaagaagggaaggaaaagtgagggctgcatgaattgatttgttatctattagagaaaaaatatctataaataatgtataattttgattccaaaagaaaatcattatttagggatgtcaaggcaagtaagagaagaaatagctaagaatattaatagacggccgggtgtggtggctcatgcctgtaatcccagcactttgggaggccgaggcaggcagatcaagaggtcaggagatcaacaccatcctggccaacatggtgaaaccccatctctactaaaaatgtaaaaattagctgggcatgttgctgcatgtctgtaatcccagctactcgggaggctgaggcacaagaatggcctgaactcggcaggcagaagttgcagtgagccgagattgcgccattgcactccagcctggcgacagagtgagactccgtctcaagtaacaagaacaaaagcaaaaacaagaatgttaatagacttttccaataaggaaaaggacttgaggtggaacaggctaaattatttttattgtagtcccttgtgtaccatttgattttttttcttttctttttttaaaccatgagcctatattgattggactaggaaatatattttcatttaaaataaaataaagaggtttcccccagttgctagttcgtataatttaatagttctcaacaggggcgattttgttccccaagggacattgagcaatgtttggagacatttttggttgtccccaaatgctatttttagggtgctatttggaggtgctattggcatctagtggatagaggcgaggagtactgctcagcattctacaatgcacaggacagcctccaccacacaaaattatccagcccaaatgttgagaacgttgagattgggaaaccctggctttaaaaaattatcttcatagtcgttctcaccagtgcagttgtatcagcacaggctctggaatttgatgtcctgatgaatgtcctccaatacaactgacctctcaacctcagttttcacatctttaaagtggaggctgctaacagaacccacttcttttgaagatggaaccaataccctcaggctccttggagtctgtaatattaaatgcccagtttgtttttatttttatttttttcgagacggagtttcactcttgttgtccaggctggagtgcaacggttcgatctcagctcactgcagcctccacctccctggttccagtgactctcctgcctcagcctcccaagtagctgggattacaagcatgcaccaccatgcccggctaattttgtatttttagtagagacggggtttcaccatgttggtcaggctggtctcaaactcctgacctcaggtgatccgcccgcctcggcctcccaaattgctagggttacaggcatgagacactgcacccagcctaaatgtccagtttatattggttatcatcattgtttgctgatgtatctccccccgcatcccccagcaaaagagcagaaaataatcaactttcctcaaacgaatgaattccagaccccttcccttgggggctgtgtttcttagcttctaaaccaggagtgttggaatgcatgtctaaactttctcccatggggcggggtgagaattaagtgaaacgacctaaagaaatttcagtagaaatgtgagatgctggggactgaaagatatcgcccctccaaaggaaggaaccagcaggagcaaacactaggtaaatagatttagggaacacaggttattcctgtttctgccagcccccaggagggagcagtaaaggtgtgctgggttaaatgactatgaatttcacctattgttggccgccctccacccccataacccctattgtctcagagcctcaggttactcatggttaatgtaggaacattggtgcccacacggcaaagattctgtaggacttctgtaagacagcgaagcatgccaacagccttcaatcagccatggctactagttcttagtttctgataacatttttacgaggatcgggtcttgagtaaacggcttgcctagagccacgtgcaatcccacttcccatccgcgttctcacttggttggaggcagcttctgtgccctttataaccaagagcaactgagtatagaggagaagaagtgttttgtccaaggtcacacgaagccttgggagcatccgtgaaatttggacccaagaccgaactttcagactctgatctcagactttccacctccgattgttccacttccccaacctactagctagttctagaacggacagatccatgcttctcaaaactgttgcatagacccctacccagtcccagacaagtttctttaagacatatttgcacccaagcttttggcattctactctccttcccagccccagccccatctcgggggcatctaactctaccccttcttccccatcaggtttgaactaggggaggggagggggatgagaagagaaaagaaaaaattgttggtgaaagtcaaaaggcttgttaacgtggtaagttcaatattgttttatctggggtggtggggggggaatctttgccctcgccacttggaggaggagcggtgggaagaccccgggaagttgcgctttcccttggattttgggaaaggggagcattcctggggtccttttgaaaaggccctcccctcatttccggccgccgctgccagccttggctgggcgcctggatcctgttgctatgacgacaggaagaggcggtggcggcggcaagcgatgctgaagagagatggaggctagtgggggtgggggtggtggcattggaatgggggagggggcagggatccggggctggggacgcgggagggggcgggggcaggggtatccttcatctctgacctcctcggggcttctcagcctcacccctctcccgttattttttctgggcttccttcgggtgcatccccagtctctgtgtctgcctctgtttctctggatctctctctcttcctgtctcagtccctctccgtctgtctctctctgggtctccctcttttcctgcacttgcctttctttccccaggtaccttctgccatccaggcccttctaccctccatttctttcatttactatcttgctcccccgctccctctccgcatcttcttctctctttaaagcttccttctctctagcaagaccttgcccccatccccaatttctctccctacccgctctccatttcattccctctcccccctctctcccccatcctctcagtctctctctttctgtctgtctctccccatctgtccctcctccctcctctctggatgactctctccctctctcttctttccttctgtttcccagatcctgaccccccccacacacacacttaccccagccctcccccaccccctcccccccagcccctgcgtttctctctttgagtctctgtccctgtccccttctctctctggatatttctctgtgtgtatctctccaacttccttctgcttccagccgctgcctcccccaaatttctccctcccccatttctgtttcgcggtctctgggtctctctctttccgtttctcctcgtctctctctgtctctctccctccctctctggatctctctcttctcctccggcttccttctgccactcgaccctgcccccctctttcccttcccccatccatctcctctccgaggctccccatccctcagcagctcccctccccctccctccctactccctccctctcgtcctccagctccgcactttacccagcgacacgagaaccaaattgtctcctcaccttttttttttaatatatatatcccgaccctcactcccttggggcccaggctcagagctgccccccagccccagcctgacctcagcacccccattccccatacgcctcctcatctccactccccgaaccaggtcggacgcctgggtccctcactgctgggggagggggaagcagcgagaattgggagccaaaaggtttttctggggggggtgccaacagggggggctcgacgtcccctcctccgtgcatcggagagttgacctatcattaacagaggtgagacagatctttttattaatcggaggtgggtggaggtagaattaatgttctgtgatccccccccccgaattctggagaaaagagctggtccccttcctaaggagaaaggagagtgaccccctcatatccggaagctttagaattgggggtccccagctctcttctccctggcagctgctgaacgatggactaagagtccctaaaaccagattgtgccccaaattgacaaaatgaaaagatcttcgaatctttttttttttttttggacggaaggagaatttccctcctttccctcctcttcccttcccctcttatcccaggttgttaggggcctggggtcacaggcttaccccactgagagcagatatctgttaagacagggtaggtggccctgctggtggtgaggggcaccaattcggggagaagaggccaagagatcaagaagagaggaaactcagcatgcggacagaaaagagaggaaggggccggcgcccaggccgggaggctgggggttgccctgtccagcgggctgctgaactgtggcctgaggaagggctgtgtgtgggcagacgggagttgaggtgggggagggaacacaacgtgtggggcactaggcccagttgccatggagacaccccccatagacaacctttttccacagcccctcctcggagcagccccagtctgaggccagctgatggggggcagtggagacgggcaagcaatcaggaggccaaggtcaccctgtactgggacctaggttctggtttttgttttgtttttttttaatcccctcttcgtctaaggtttccaggctcttaactatagtgggtttgggggaagaagttgaagaagcagtgtggaagcaagtaaggagtacatcccccagaggacagttggggtgggggagacaggcagggctgggggcatggtggtcgggggagaatgtggaagagagaaatgaaggagccacggggcagcgggtgcaggctgggaaagtattcctaattgaaaagagagttgtagtcttgcggatcacatttttcagagggacacagtctactgggggggctctttctgcatgtggaagaagatgaggggctacagtgtgtgttcctgtacaggtgaagtcgtagaggggagtactggggggcgttcccaagaagggaagcctgtgggggcctgcggaggggattttccggggcagaggagaacctgggagctatagcggtggagcaagaggaagtgagtcaagggaattctatatgatgagagagaagttggggaggatgcttcctggtacattgaagagagagtgggcttcaaagtgagttagggggatctcaagttgggggaaacagtgtgctgaagatcccgtgtgatgatgaagggctacgaggaggggatttggaggcagtgggagctgctgtgagtgcagaggggcgggtgggtggtacagtgtgccccctgctatgggagtacagggcagagattggaatggtcctgagtggagagacatttggggtctggaggaagccattcttgcgagtagaaaatgccgtggaactcacggaggaaatttttcttaatggaggagaaaacgatggttatgatatgagttcgtttaagttgtgggggggggggtggcggggtgggaagattcagaaaactcttctaaagcaaaagagagggtgggggttttcctggagtaaaggcatagtatggggtggggagtgagtggcttgtggggagacagtgggggctgtgacagggaatgggctggagatggcggggggggggcagcttgcaaaccagtgggtctgatgttgggtgcattagaattccccagggagcttttaaaaacttacatgcgcaggccacactgcagaccaaccatgtcggactttctcaggtgggactcaaacatccgaatttttaaggtcctcgggtgatttccaggtgtgttggaggctgcccgaggcaggaagggggcttccagggagaggaggctgactgagggtggctggtgattccgagttgcacaaactgtgagggtcagctgggattttctttttctttttcttcttcttttaatttttcctttttagttgaagagaggttgagagatttattttttcctaaggagaggaaactgtgggggaccatttggagtgatggaatgacaaaagccagaccggagggggctcgcggaggttactcccacggaagtggtgctactcgggcttcttaagttgtggagacgctcagggaaaagttgggctgacagggaagggttctagcgggtggagaggtggggcttgcaggggaagagtggggagagctggtgggcgccgcatggtgatggggcgggggtcgctaaggaaggaagaacgcgacgggggctcctggggaggaggcggcggcgtggggcttggcatcatggcggggggtggcttcccatgcgatgaggatcgtggagccccctggggcggaggcggcgcgggctaggggcgagggctgtgagtgtgagcggtggtggggactcctccgagtggggttagtgggatggtgggacgactttcttgggcagaagacaggagtggagagagatttcatcttatttattaattattagcggtggtggggactcctccgagtggggttagtgggatggtgggacgactttcttgggcagaagacaggagtggagagagatttcatcttatttattaattattagcggtggtggggactcctccgagtggggttagtgggatggtgggacgactttcttgggcagaagacaggagtggagagagatttcatcttatttattaattattagcggtggtggggactcctccgagtggggttagtgggatggtgggatgactttcttgggcagaagacaagagtggagagagatttcatcttatttattaattattattattattattattattattattatttttgagaaagagaagcagtggagccccgagtggaaggagtttctggagctgaggcagggattttgggggggggggggcggggactgggggaggtacctgtgccttcttctcctctaatgcgagatctcgctccttgccctccaccagccgccgaccatggccgcgctctgaccccctccccggccgcagcctcctcctcgccgcccccctccccagccccgccggccccgggccccccgcttctgcctgcgctgtgaacccccccccagccgccggcacggccccgcccccgctgccccggtggtggcccacggccccccggctgcccgtggtcaaactggagtcgctgaagcgctggaacgaagagcggggcctctggtgcgagaagggggtgcaggtgctgctgacgacggtgggcgccttcgccgccttcggcctcatgaccatcgccatcagcactgactactggctctacacgcgcgccctcatctgcaacaccaccaacctcacggccggcggcgacgacgggaccccccaccgcgggggcggcggcgcctcggagaagaaggaccccggcggcctcacgcactcgggcctctggaggatctgctgcctggaaggtagggtgcgggcggccctccccgcagcccccgccgctcccctccgagagaccctgagcctcccggggctgcctgtccctgatcctggggcccccttgggcacccctcctcctctgccagaggggcttctgcgccttcccactcgcgcccctgacctcctctcccctccttcccactcctccctgcgtcctggcaccctgcggaattcctcggcatgctccctctgcagcccctctgcctctccgctgaacccccttatcctatctttccctagtccgtgtctcctgcgctgccccatcacacccctgcatcttccctctctccagtacctggggctcctcctgtttcatttcttccactctgccctgtgccttttctctttttttttttttttttgacaaggtctcactctgtcgcccaggctggagtacggtggcacaatcacagctcactgcagcctcgaatccctaggctcaagccatcctcccacctctgcctcctgagtagctgggaccacaggcatgagccactgtgcccagctaattttttttattatttgtagagatgaggtctcctgttgcccaggctggtctcgagctcctgagctcaagagatcctcctgccttggcctccaaagtgctgggatgaagggcatgagccactgcacccagcagcctctttctccctctttcccgtcagttcatcttgaccctgctcctccgctccacctgccccttcatttcctctccctcgtgccccgtgacatcttctctctcccgacatttcccccccagtcctctgaagtcccctgcctctcccgccccctttcacggcccagtcttccggtctgtctctttccccttctctttggctgctgctcccctgaaacttcgtgccttaactcgccctcactcatgactttctctcttttctgccttgtgcttctcctcctgttcatctttctcttcccatcagtgcccccacccatgtctctcccaccagggtgccctccaacctcccatcctggtcctttcctcctttttcctttagtggactccacttcctcttcctccactcatgcctccttcgacgtcttcctgactcgatgcctcaggccttcacgttaaggcttctcgctcctgcccctgctacctcctcggatcttcgacttggttcttttcctctgtcctgttctccctctcacagcttctctcctagctcggctccctggctctcgacttccccacttctccaagactcctgccctctgctgtgccaaccccttctctctcccactcttagcatcagtatttctttcctgagtatcaagtagctgcggggctgggaagcaggagtcttgggtgccagttctgctgcatatctgccctgctgtgtgaccactgtcttccctcctgcaccccagcctcacagcccttgtctgcaacgtgaaggagtggaaccagccatcctgatgcccccttcggccaaaagattgaaatctcttgcttctctttttcatccccctctatttcctctgccccttcttcctctgttttgctgagtgttcacgacaagccgggaacgttatctcgtttaatcctatgaggtgggcaccacctcgctgttggggatgggtaaactgaggctcagagaagtgaagtcacttgcccaaggtcacctagctgagaaaggggccgagccaagagcagaactcgaatctcatggatgggattcacagatgcgctctgtctagtgtacaaagtgtttaaaactgaaagcaaaatctgaatccattgccaacagttaaaaatagggaggcttcccattgtagttctgatttccggcttcttctgagctggcggaagatctagcacaagcctgtgttctaccctgaccacgatgggccggatctgagcagcagctggggggtctccacttccccacagtcacctccatctgctccgtctcgcctcccattcctcccacggctctcgtgatgttctttgcctctcctgtggaagtttgagttcatgtccattcactggtctgaccaagtaccaggcatagagccaagtgtgagggctcccatcatgggagccctaggacagcacgtggcatctagtagggatgtcattcattcattcattcgttcattcaacgtcccatttttattgagtttatattatgtgccaggcattgttctggattctggggctgcagcagtggaaaacaaacagacaaaacctcctgtcgttatatatcttatattctaagggagagacagataatgatggaggtaaagtcaacctttagggtgttagatagaactgagtgctaaggaggacaaggagttgggggaggggatgggaggggtcagggatccccgtgggaagtagataaggaatctaggaaaagcttccccgagcaggtgacatttgatcacaggtctgaaggaagtaagagatggaggaaagtgcttcagactgtaggaatagcaggcgcagaggccctgaggtgggagtgtggctgtgtgttgatcaagccagtgtgaggtcagcgtggccggggcagagtgggtggcggagaacgtaggagtaagaggtgcagtcgtaggggtatcagggtccccatcccacaggttctgttttttaaaaattatttatttatttatttatttattgaaacagagtcttgctttgtcacccaagctgtagtgcagtggcgtgatcttggcttactgcaacttcggcctcctgggttcaagcgattctcatacctcagcctcccgagtagctggaatcacaggtgtgtgccaccatgcccggctaatttttgtatttttagtagagacagggttttaccatgttggccaggctggtctcgaacttctgacctcaagtgattggcccgcctaggcctcccaaagtgctgggattacagatgtgagccaccatgcctggccagcttctgtgtttgtttttgttttgtttttctttttttgtttttaggcagggttttgctctgtcacccaggctggcgtgcagtggtaagaccatagctcactgcagccttgaacccctgaacccaagccgtcctcttgcctcagcctcccaaatagctagaactacaggcacatgcccccattttttgtagacacagggtctcactatattgcccaggctggtctcaaactcctgggctcaagcaatcctccggcctcagcctcccgatgtgttgggattacagatgtcagccactgcacccggcctcacggcttcttatacatcccagaaagcactttgctttagattcggagatgggagccgttgaaggttcttgagcagaggagtcacacgagctgacttacatttttgcggtatgtttcttgctgctgtgttaacaaatgaccgaggggaaggcaaatgagacaacgagaggctcatctagggtgggggcagcagggtttgggaagttgtttgaattttgagtatattctggagctaccgtgggcaggagttgctgatggagcagttgtaggatatgagagagaagagccaggggcgtctccaaagcagggtttttccaccgcagcatggttgatattttggggtggataattctgtgtggaggggccgtcctatgcattgtaggatgctgagcaacagccttgatctctcctactaggatgccagcagcgcccttcccagtcgtgacaaccaaaattgtaaattgtgtctaaacattgtcagctgtctcctgggggataaaatcgccctgagttgagaatcaccgctctaaggctttggcctgagctcctgagaataggggagccattcataagatgaaacagcagctgttttatttattttctcttatcaaatttattatgaaggagagggaccatgggctcagttttgggcatgttaaatttacgatgcccattaacagataacatctggacagaggtcagcacagtgaaggtcctataaagtgccatatagtaaagatttcaggctttgtggagcagtctctatcacgactactcgtgaaaacgaccaagacagtctgtaagtgagtgtggctgtgttccaatgagacttcatttatggacactaaaatctgaatttcactgggcgcagtggctcacacctgtaatcccagcactttgggaggccaaagcaggcggatcacctgaggtcaggagttcaagaccagcctggccaacatggtgaaaactggtctccactaaaaatacgaaaattagccaggcgtggtggcacgcgcctgtagtcccagctacttggtaggctgaggcaggagaatcgcttgaacccaggaggtggaggttgcagtgagccgagatcgcatcactgcactctagcctgggcaacagagagagactctaagaaaaaaaaacttttttttttgaattccatgtcattttcacatgccacaaaatcatcttcttctttgacattttctcaatcattaaaaacacataaaacccattcttagctggatttggcctgtgagccatagctggctgaccagtgatttaggctgctagagatatgatgtaggaggccagaggctgggctggagatatcagtttgaggggcatcatcatatagatgaatcagatggatggaatcacttagagaagagacagttgggtgcagtggctcacacctataatcccagcactttgggaggccaaggcaggaagatcacttgagcccaggagttcgagaccagccaggggaaaacagtgagaccttgtctctacaaataatttaaaaattagctggaagtgctggtgcgtgcctgtggtcccagctactcaggaggcttaggtgggaggattgcttaaacccaggaagtcgaggctaaagtgagacatgatcataccactacactccagtctgggcgacagggcaagaccccatctcaaaaaaaacaaaaaaaaaaagagagagaagagaccagaacaaatgataaaatgtccttatgtcattgaaggcttaagctttcggccagtctactattaaaatgtgagggagatggccgggcgcggtggctcacgcctgtaattccagcactttgggaggctgagacaggcggatcacgaggtcaggagttcgagaccagcctgaccaacatggtgaaaccctgtctctactaaaaatacaaaaattagccgggcgtggtggcgtgtacctataatcccagctactcgggaggctgaggcaggagaatccctttaaccctggaggtggaggtttgcagtgagctgagatcgtgccactgcactccagcttgggcaacagagtgagactctatctcaaaaaaaaaaaaaaaaaaaaaaagggagggaggtgagaagtcaccaaaggagtggagaaaggagtggccacaggtttggggaaaaacaggtccttggatgtcttggaagccaaaggaagttagcgtttcaaggagaggaggaatgaaggctgactctgttgttgttgtaattgtcattcatttgtcactgaatgcgcacaataaccctgcaaagtaggtactttatttatttatttttattaattttgttttcgagacagattcttgctctgtcacccaggctggagtgcagaggcgcgatctcaacccactgcaacctccacatcccgggttcaagcaattctcccgcctcagcctcctgagtagctgggattacaggtacccaccaccacacccggctaatttttgtacttttagtagagacggggtttcaccatgttgaccaggctgatctcaaactccggcctcaggtgatctgcccgccttggcctcccaaagttctgggattataggtgtaagccaccgcgcccagccggtacttttattattcccattctaaaagaagaagtgaagctcagagaggtgaagtgagttgcccaagatcacacagttaatatgcagtagggtctggatttgtttttgtttctgatttgtttacttttttttttttttttagagatgggtctcaccacattgcccagcctggtctagaactcctgggctcaagcaatcctctcacccccggcctctcaacgcattgggattacaggagtgagccaccctgcccggcccagcatctggatttgaatccaggtgtgtctggttttctaggagaatgaagcaacaaatccacttgctttcagcccatcggggctccaggggtgtagaaacggggtccccctgagtcattgcgtcctgcagccactgtgctcctgggaacccttgggctcaatctccatttccctttggagtgtgtctgagagatgcagtagaatgtaatgactgaaacaagctcggaggctgctctgcctaaggagcggccgttctttattcctttactgtctttaataaacttgctttcagctgggcgcggtggctcacacctgtaatcccagcactttgggaagccgaggcgggtggatcacctgaggccaggagttcgagaccagcctggtcaacatggcgaaaccctgtctctactaaatatacaaaaatattagccagggctggtggcaagcgcctgtaaccccaggtaatcaggaggctggcagggcgcggtggctcatgcctgtaatcccagcactttgggaggccgaggcgggcggatcacgaggtcaggagatcgagaccatcctggctaacacggtgaaaccccatctctactaaaaatacaaaaaattagccaggcgcagtggcgggcgcctgtggtcccagctacttgggaggctgaggcaggagaatcgcttgaacccaggaggcagaggttgcagtgagccgagatggcgccaccgcactacagcctggggaacagagtgagatcccagagtgagaaagaaaaaagaaatataacacaaggatgggccagtggctcacgccttgtaatcccagcactttgggaggctgaggtggacggatcacttgaggtcaggagttcgagtccagcctggcctatatggtgaaaccccgtctctactaaaaatacaaaaattagtcgggcgtagttgtgggtgcttgtagtcccagctactggggaggctgaggcaggagaatcgcttgaacccaggaggcggaggttgctgtgagctgagatggcgccaccgcactacagcctgggcaacagagtgagattccagagtgagaaagaaaaaggaaatataacacaaggatgggccactggctcacccctgtaatcccagcattttgggaggccgaggtgagaggattgcttgagtccaggagttcaagaccagcctgggcaacatagggagaccccgcctgtgtaaaaaattaaaaattagttgggcatggtgatacatgcctgtagtccccactactagggaggctgaggtagaaggattgcttgagcccagaaggtcgaggctgcagtgagctgtgattgtgccactgcactccagcctgggtgatagagcaagaccctatctcaaaaaaaaaaaaaaagaaaagaaaagaaaagaaaaaaagaaatataacatgggtgaccatatatagttaaaatttttaggctgggcacggtggctcacgcctgtaatcccagcactttgggaggccgaggtgggtggatcacgtgaggtcgggagttggagaccagcctggccaacatggtgaaaccccgtctctactaaaaaaacaaaatttagccaggtgcagtggtgggcaactgtaattccagctactcgggaggctgaggcaggagaattgcttgaactcgggaggtggagtttgcagtgagccaagattgtgccactgctctccagcctgggcaacagattgaggccctgtctcaaaaaaaaaaaaagaaaattaaaatttttctagtagctacattaaaataaataaaaaggaacaggtacccagcatagccaagatattatcacttgaacatgtaatcaatataaaaattattaatgaaatattatacatagacactctctctccctttttccccatcctgagtctgaaacccagtaaatattttaccctcacagaacctctccattgccacatttcaagtgttgggagctggaggcatctgcatgggacagcccagcttgtgccccctcctcagggatttcagccacaccccgaggtcttctctcaggactcaagagtctgggcccacagccctatttattagtgccgaccatacagagcccctttgctagcactttgccctgcttattatctcattaagccctcgccactttgccaggggaatgtattattagcaggaatctgatggccagaaaggggaagtggctcagcctggactacccagcatgtgaggggcagagtgggttggatcccagttctccacgtgtccgcactgcaagaaagctgccccttaacccttgcatgcccgggtctgcgctaggcagcccctgggaggagactcagggccatgacatcaccatccatgcacaagaaaaactcatagcttgatcggtggcattaagcataactactgtgaattctgtgcctaacttccttttttttcagacggagtctctctctgtcccccaggctggagtgcgctggagtgcactggcgtgatatcggctcactgcaaactccgctgcctgggttcaagcaattctcctgcctcagcctcctgagtagctgggattacaggcacccatcaccacgctgggctactttttgtatttttcagtagagacagggtttcaccatgttggccaggatggtcttgaactcctgacctcaggtgatctgcccacctcgccctcacaaagtgctgggattacagctgtgagccactgcgcctggtcttctgtgcctttctttcttgcttgctttctttcttttttttttctttcttctcttttcttcttttctttttttttttttttttgagacagagtttcactcttgtcgcccaggctggagtgcaatggtgtgatctctgctcactgaaacctccacctcccaggttcaagcaattctcctgtctcagcctcccgagtagttgggattataggcacctgccaccatgcctggctaatttttgtatttttagaagagacagggtttcaccacattggccaggctggtctcgaactcctgacctcaggtgatccacccgctttggcctcccaaagtgctgggattacaggcgtgagccaccgcgcctgggcttctgtgcctaactttcactgaaatttcactgaagccctctaaagtcacactaccatcctcaatttcccaatgagagagcagaggctcagggacgatccggttccaaaaccacgcagctgggaagtggtacgttgggatgtgtgtccagagagttggattccagagcccacgatcaataacccccacagccaccagactctactgtcttaaatatgctgaactcccaaaccgagctgtgctggaaggaacctctccccatcactcacccccaatagggctttgggcaacttcttcaactccctatgcctccatttcctcatttgtaaagcaaggatgctgtcactgcctacctccgagggtttgtcctagggactgagcaagttattaaccacctgtcaaatgcttggagcagtacctggtgcacggttagtgctcagtcagaactagttattattactgtcaccactaacctgttcagcaatccggtgtgccatgtggtttacatgctcagtctcatttaatcatcacgaatattttgagagaattactatgatcccattcaagaaaggagggaccaggctgggcgcggtggctcatgcctgtaatcccagcactttgggaggctgacgtgggtggatcacctgaggccaggagttcgagaccagcctggctaacatggtgaaaccccatctctacttaacatacaaaaaattagccaggggtggtggcaggtgcccgtaatcccaggtacttgggaggctgaggcaggagaatcatttgaacctgggagggggagtttgcagtgagccgagattgtgccaatgcactccagcctgggaaacagagtgagactctatctcttaaaaaaaataaataaataaaaactggacaagatggcttacccctgtactcccagcactttggaaggccgaggcaggaggatcgcctgaggtcgggagatcgagaccatcctggctaacacagtgaaaccccgtctctactaaaaatacaaaaattagctgggcatggtggcacacgcctgtaatcccagctactcaggagctgaggcaagagaatggcttgaacccaggaggtggaagttgcagtgagccgaaatcgagccattgcactccagcctggtcgacagagtgagactccatcccaaaaaaaaagaaagaaaggagggacattgagcttgtcatcttacctaccacaccatggtggaggtgctgatgggttaagagtttgtatgtgggagttgtatattcattcactcattcactcattcattcgttcattcattttgataattgtagtaaattatacataacataaatttaccatcttcatcatttttaagtatgcatttcagtagtggtaagtgcaaccaatttccagaactcttttcgtcttgcaaaatggaaactcagtacccgttaaataactccacatccccccaccctccagccctggcaactaccatgacactttgtctctatgaatttgattattccaggaatttcatataagtggaatgacacagtatttgtctttttgttactggcttatttcactgagtataatgtcttcaaggtttatctatgtttatagcatgtatcagaatttgcttccctttgaaggctgaataatattccattgtatgtacatagcacatgttgtttatcctttcatctgtcaacgggcactggggtgtttccgctttttggctattgtgaaaaatgctactatgaacacgagtgtatgaatatctatttgagtgcctgcttttaattcttttgggtctatcaccagtactggcattgctggatcatatgatgattctatttgtagtttttgaggaacctcgacactgtttcccatagccactgcaccattttatatttctaccaacagtgcacaaggttccaatttctccacatccttcataacacgtgttattttatttatttatttatttatttaatttatttatttttgagacagagtctcgctctgtcacccaggctggagtgcagtggcatgatcttggctcactgcaacctccacctcctgggttcaagcgattctcctgcctcagcctcccaagtagctgggactataggcacacaccaccatgcccagctaatttttgtatttttagtagagacagggtttcaccatgttggccaggatggtctcgatctcttgaccacgtgatccgcccacctcggcctctcaaagtgctgggattactgacgtgagctaccgcacccagcctattttattttatttttttatttatttagagatggaatcttgctctgtcaccaggctggagtgcagtggcgctatcttggctcactgcaacctccacctcccggcttcaagtgattctcctgcctcagcctccctagtagctgggactacaggtgcacaccaccatgcccagctaatttttgtgtttttagtagagacggggtttcactatgttggccaggatggtctcgattctcttgaccttgtgatccacccacctcagcctcccaaaatgctgggatcacaggcgtgagctcctgcgcctggcctattttgcttatttttaatagtaaccatactaacgaatatgaggtggtatctcactgtggttttgattgcatttccccaatgattagtgaaattgagcatcttttcatgtgcttgtggacccattcaatcattctttttttttcttttttgagactgagtctcgctctctcgcccaggctggagtgcagtggcgcgatctcagcgcgctgcaacctcctcttcccagattcaagcaattcacctgcctcaggctcccaagtagctgggactacaagcgtatgcccccacacccggctaacttttgtatttttagtagtgatggggttttaccatgttggccaggctggtctcaaactcctgacctcaggtgatccacccacttggtctcccaaatggctacgattacagacgtgagccaccacacctggcccattcaaccattctctcattaaaaatacttattaagcactcaatatgcactaggcactgttctagatgctggtaatacagtgtcgaacagcccagatgctcacattcatgatgtgtgtttgagttttgttgccaccatcagctgcgaaatgatgacccttttctgtttctcagtttccacgtttgggtaatgggtgctatacatcagctgctatcaaccgagtacttaattgtgttcaaggccaagtgctaaatctccacctagacccaatccctcatatcagtcccatgaggtaggtcctgttctctgcattttataggtggggaaactgaagcaagctggcctatgtaacaccagcaaggacacagaataaggaagtggtggaggccagcgcagtggctcatgcctgtagtcccagcacttttggaggctgaggcgggcggatcacttgaagtcaggagttcaagaccagcctgggcaaagtgggcaacatggggaaaccctgtctatacagaaaatgcaatatttagctgggcatggtggcgcaagcctgtagtcccagctactcaggaggctgaggcaggaggaccacttgagcccaggaggtggaggttgcagtgagccgagattgtgccactgcactccaaacttgggcaacagagggagaccctgtctcaaagaataaaaaaaatggagacgttccaatacctaacatttggctgccacagcacacaaaccacatgatctatttcataggactcttgggagcatcaaatgagttggcccacctagcaagcaccaaacgcacattagctcttgccagtattactcactcccttatattaattcttcccagttcctcctttatccctattctttcccctactttcctttgctggtcatggtctgcctgtgatctcaccttctgctatgcttatattcattcattaattcattcattcattcttcattcaaccctcatttctttctctctctcttttttttttcttttgagacggagtctcgctttgtcacccaggctggagtgtaatggtgcagccttggctcactgcaacctccacctcctgggttcaagtggttctcctgcctcagcctcccgagtagctgggattacaggcacccgccaccatgcccagctaatttttgtatttttagtagagatagggtttcaccatgttggtcaggctggtcttgaactcccgacctcaagtgatccacccgccttggcctcccaaagtgcagggattacaggtgtgagccaccgtgcccggcctcagcccttatttcttgaggtctcccgtgtgccaggcctactgccaagaaatgctgggacacacagaggaatcggactcccatgccctaccccctccaggaactctcagcttaccgaggacgaagaagatcatctaccaactaatgcatgtcctacggggcacctcagagcaggaaactgacccaagttcggtgggaggaatgagtgtgcatgtgtgtctgtgtgtgtctagggaaagcctcctcaagaaggtgcctcctgagctgcctgctgcaggtaaagtactacatcagcaaagaatgtgagctggaatgttccacagcatgggcagaggtctgcagaactggacagagctgggcagttgaggaaactacattgtttatacttatatttttaatttttttctccagctatgtgctagaggtggtaaaacattaactgttcccaaggatgagaaaatagctgaggatgagcatcttaggaggggaaggagatgaggatgcatgacccctagaggcatactccacccctcacacacctctgcttgcttcaactactccatttctctccagaaggttccaggttccctgcagaaagagactggaacctctctctccccatccccacaggactagagactacaactcccatgatccactgcggctgctcttctcacaactggactccagacttcacggggtctcatgggaaatgtagtcctcatcggcttccgcatcactttccttgttttttttcccacgcatttccagacttttcaaccaattgagaggtgggaagcgccttgctattattgaagccaacaacaccctctttcttacagaggtgggagccggaagtccagagtgctggagcaacttagcgcagcttacaggaccaaggtcctgtagccttgcagtgagtgctgcaaggatgttagactttgggtttttttccttgcttttcttcttttctttaacaggcggggaaacagaccagagaagttgaaagtttgtcccatatcacgagtcgggctcaggagccaggacttgcggtctcccaagcagcccagagagagaaggggtttggggaagggaagggtcggttgtcagtggggttgccccgcccccaaccctgaagtatccgcccccaccactgccctccccgctcctccagggttgaaaagaggcgtctgcgtgaagatcaatcatttcccggaggacacggactacgaccacgacagcgcggagtatctactccgtacgtgggggtccgggacagacgtggggagtgggtcaaatcgcggggcctggaaggcgtcggggtgggtgccgggaaaaggcactgggactccggcacttggatcgacacgccgaggttagcctcccagccaatccgagtccagatagtgagatcctctggtccccgattggctgactgatctcgttcccgccccctcctctcaccttggggcgggctgagggaggatcctgggcgctaattggccgctttgctctctttggccctcgcggcgactctgcgccgtgactggttgtggaatcccggactgggattggccaccgcgccgcagagctgtggggcaatctgcggcggtgacgggccactactgggagccggctgggaaagcctgtattgccattggtagctaccccgagaacgcggcaaatcctaaatgatgattggctgcggcctcagccaggttccgaaatcgcaaaatctagttgcctggggttttaggggtgggtggaaaggaaggactgcagagaaaaagaggagggcggggcggggagtgggggcggggagagagagataaggggaagaagggagggaggaaaagagggagaaagagagatagacgaagtcaggcctaaagggggtagggagggagggaaggaggaagggagaggaagggagtgaagagaagagaaacctggaagattgaagaaaccaggcagaaaaggaggggagagagagacccaggaagatagaggaggccaggcgaaaaaaggggtggggtggggtggggtggggaaagacctaggaagacagatgaggccaggcagaaaaaaaaagaggggggagagacctaggaagataggtgaagccagacagaaaaagttgtgggtgggggtggctaggaagacagatgaggccagggagaaaaagtgggagagagacttaggaagacagatgaggccaggcagaaaaagcggggtggggggggacctatgaagacatacgaggccaagcagataagaggagagaggggagacagagccagaaagatagatgaagccagcaataaaactgggtggggtgggggcgtgaggagaagaagggaagagaaactcagaagtagattcagcctggcagaaacgggaggaggaggaggaaggaaggaatgtagagagagagagaaacccagatagatgaagcgaggcagaaaatgggagggggtgtggagagaggtagtaagtgatttgcgggatatggagaaagaaattcgcagacgagaggaaggaagggacgagaaagagaaagggagaggatccatggagaagttgggagaaaaacagggagagtgatttcgataaataaagagggggaaagatattccaagagagagaaaaatagtccgaagaaaaaagaaaaggacaaagaaaaagagggagagaaaatcagaccgagaaatagagaaattttaaaaacaggagagagaatgaggcaacagtaaaataaaccagaacacagccggagagagagaatcacagaactgtcgggaggcgccgcgagatggggggccgggaagggggcgcaggcggccgcgtctgaccgccctcgctctccctccttttcctttccttcctcccccgcaggagttgtccgggcctccagcatcttccccatccttagcgccatcctgctgctgctcgggggtgtgtgcgtggcggcctcccgcgtctacaagtccaagaggaacatcattctgggcgcagggatcctgttcgtggcagcaggtgagaggcagagggagggggcgaccggggcggcccacctgggcgcgcacgtgtgtgtgtgtgtgtgtgtgtgtgtgtgcgcgcgcgcgcgtgagtgcaagtgcgcgttcgtgtgtctgcaaagccaccttgccccgagcacccccgggggcccggagccttcctaggcggtccccaagctccatcgccacccgctgggtaaggtgggtgtagttctcgcgtcgccttcggaggagtaaaccgacacaggcaggtgtctggcgcgtaagacgccgggcgcttaggatcccaagcccgccgtcctggagacggaaggggaggagctggggagggggtgggaccttgagacacaattgggctcttgaggatagagaggcggggctgggtcttggagggcgggcccaggagaggtagaaagtgatctgagcgccgatgaggagcctgctttaaggggcgggcctttggagactttggtggatccaagagggggctggtcctgggaaaccgtccagggccgggaagtggaaactaaaggggctgggtaagggagactgaatcggcccttgcccgtggccatttggagaaggagaggctagaaaagacggggcgatgcctggaaaagccaaagggggaggggttatgtccttaagggcacagagaatcaacctggctgattgaagcaagaggccgaccaaagccagtcagtacctgggattggccgtctcaagagctagggcctagacgagcagagagctaggactggaacacttaagaggcacgcaattaaggggtaaggccccctttctaccccgtatgagtagcattgggaaattccaggggcagagcttttttggaggagtagaatacagagaagagggagggctttgcatatttgaagagcagggtgtgctttggggatgggtctagatctgcaaggggtggggcttggaggatctgaaaggccggagtagctggacctgagaccggcaaggacccgagaccggcaaggaccctggccaagatccgcacggggcggggtttggtaagctggaggtggggcctagagtagaaggcggggcctgctttattaaaggcaaatttttgaccagtaggggagggcctagaatggatactccggcaggaattatatgaagagagattagataagtgaaaggcagggcctgatcacagcaggatgacatcattaacagagttcaaaggagcagagggatgaggcttgggaaaaacccaggtttataacgttaagggtggaggtagactaactagggcagggcctggaaactcatctcatcaaaggtgggttttagaccagtcagggcagggcctggactcgctgggagtggggcttaggccacctaggggtggggcctggaccgcttggggtggagttaccaccagccagggtggggtttagaccagcagagttgggaccttagctagaggagtggggtttatgccatgtgggggcagcccagaccatctgggggtgggtcctagaccacctggggcagagtttagaccagccagggctgggttagaccggcagaggtgggccgtgggctatctgggggcaggacctggaccatccagggccgtgtctggaccattcagggcagggcctggaccacctgggggtggaatttagaccatctgagggggtgcttgagcctgcctgggccaggaccacgcatgatgcagtctggaccattggcggccctacaccacctgggggatggagtttcgaccagccggggttggattagaccagcagaggtgaggcctgggccagctaagagtgggccggagccctctgggttggagcttagaccagcagggaagcgcctagagcatcgggcggggagttgtgttcacttctggcaggacttgggtcagccagatccaggacgggggtctagaccactcggggtggggcctagaccgcctgggggtggcgcctgggcccgctggcgcaggcgggcaggggtcggggccgggggcgggggcggggccgggggtggcctcgaggctcccgtctgaccgtccccgcccaggcctgagcaacatcatcggcgtgatcgtgtacatctccgccaacgcgggcgagccgggcccgaagcgggacgaggagaagaaaaaccactactcgtacggctggtccttctacttcggcgggctgtcgttcatcctggccgaggtgataggcgtgctggccgtcaacatctacatcgagcgcagccgcgaggcgcactgccagtctcgctcggacctgctcaaggccggcgggggcgcgggcggcagtggcgggagcggcccctcggccatcctccgtctgcccagttaccgcttccgctaccgccgccgctcccgctctagctcccgctccagcgagccgtcgccgtcgcgggacgcgtctcccggcggccccgggggcccgggctttgcctccacggacatctccatgtacacgctcagccgcgacccctccaagggcagcgtggccgcggggctggcgggggccggcggcggcggcggcggcgccgtgggggcgttcggcggcgcggccgggggcgccgggggcggcggcggaggcggcggcggggcgggtgccgagcgggaccgcgggggggcgtccggcttcctcacgctgcacaacgccttccccaaggaggcgggcggcggcgtcacggtcacggtcaccgggccgcccgccccgcccgcgcccgcgccacccgcgccctctgcgcccgcccccgggaccctggccaaggaggccgccgcctccaacaccaacacgctcaacaggaaaaccacgcctgtgtaggggcgcggcgggggagccgaggggcgtgtccggggcgcgtgcgcgggcgcgcgtgcatcgaggctgccggggtcgggggcgcccccgctttcccccgtgagcgcgctggagactgctgggcccgccccacgcccaccctccccgcccccctccccctccgaagcagggaccccgagggagggggcaggggagggagggggccgctgtgagggagcgtcgtgttttatttttttgggggatctatggggaggggggagggccatggtgttttttgcagtttcgagatgttttctttttcatgttttgctgtgtgcatggggggcggggcggggggaggggagggagggactcccagcccagcccaactcctggagaggggcccataatacacgaatacatagttacacccacaaactatatatatgccctatataaagagacacagcgaagggatgcagaaaggcagaaagaagggttggacgcgggcattcattcatttttttcattcattattccacaagggcttattaagcacctactgtgtaccaggcactggtacataagaaggcattggagcaggggacacgaacgaggcacagaaagggccttctcattcattcattcattaccggcaatttatttgtgcgccttaaaaagctaggcattgtgctccgtgctcagcgtgcaggaggcaggaaaacagccaggggccccgacgtctcatagagtaaacatcttgtgcatgagacaggcattaatcgatcatgtacatacacaataaattacagttaggctataggagaaacgagatgctatgaaatgctccatcaggggagcctaacccagttgtgaggaagagatttcagtggacagtgaaaggatgagaagaagccagcagggcggagctggggcaggagtgtggcaggcagagcagcacgtgcaaaggccccggggcaggaaggagcttgcagcgagggctgaagggtagtgaggcaggtgagcggggatcaaggtgaggccggagacacagacagggccagattgtgcaggggctcgtaggtcaggagttcagattttattctaggagtggtgagggccgtggaacgggtttaagcaggacgctaacgtgaatggtgtacaaagggaagacaggaactcggaggcaagagtaggaggcagagatgtgctgaaatacagcatcaaacatgggcacgggcccttggagctcacactcttgtgggaggaagcacgtaattacacagatgctgaagcatagtcatggtgtctggtgtgcaggagaaagccgtggggcttagagactcatgtgtctgtcactcgttcattcagccactcacccattgccatttttggccatctgctaaggtaccaggaagtgtgttaggatccagatccccaggggtgaaacagactctagccctgctctcaagcagtttattgtcatcaaacaccgccatccaggcagggcaatcggtgctggaacccggaccaccgtgggtaccgtggcacacggtggacagagtgaccaactgccaggagtgagcagcacttggggtaggcttcctggagaatatgatgcccattctgggtcttgaagaaatgagtgggcatcttctggttgatgaaaggcatgagaaaggcttgtggggccaaagaacaacttgggtgaaaacgggaggaagtgaacgagcatgatgtattggggtcagtgctaacagttctgggatgctgatgtacaaggtggggctgggagatgaggccgggaaagtagccacaagctagagtgtaaaggtaccagggtggccgggcgcggtggctcatgcctgtaatcccagcgctttgggaggctgaggctggagtatcacttgagcccaggagtttgagaccagcctggataacatggcgaaaccctgtctctacaaaacattaaaaaaaattagccgggcgtggtggagcacacctgtggacacagctactcaggaggctgagggaggaggaccatttgactccaagagttcgaggctgcagtgagctaggatcgcggcactacactccagcctgagcaacagactgagatcctgtctcagaaaaaaagagaaaaaggtgcctgagttccaggcagagggactgaggctcttctaaggatggtgagagaggatgacagctgcgcgggggcaagggctgtgcggtgattggaggggatgggtttgaagttcactgagaaggcagaggggacagcgcccagtaggcttcccttccatatttgctcagcaagtgtttcctgaggcctcccccgaagccttgtgctgggcggtgctgggagtggagaggtgattttgatcttgccctgctctcaaggggctcccagtctggcgggaaaacaggcacagacgcagcttgaggaggacgtggcagcggtggtgccatgctgccaggggctctgcgtgcccttctcttgacggaagggtacagatcagagctgggtgttcagaatttctctccgaggcctgtgtggaaggaccaggaagagagagactgaaggtccctaggaagaattctgccaaggcggtttcaggaagagatgctgggaaatgtaggaaaaggaatacaaatcagtgagacggagaagcgctgagtgagagagacggatacgtggagagaagagggatgccggagcgggtgttaaaagagacaaatctggccgggtgctgtggctcctaatcccagcactttgggagactgaggcaggcagattgagctcaggagttccagaccagccaacatattgaaatcttgtctctaccaaaaatacaaaaattagccgggtgtggtggtgcacgcctgtagtcccggctactcaggaggctgaggtgaaaggatctcgcttgggcctgggagggtgaggctgcagtgacccgtgatggcaccactgcgctccagcctgggcgaaagagcgagactctgtctcaaaaaaaaaaaaaaaattgagagacagcaaatatttgctggaagagggagagggaactggttaggggagaatggattctagagtctgaaggccaaacagaacgagagagagagagagagagagagaaagaatgaggttgagggtaggcaggaggaagagcaagatggggagggagggggagagcaggagagaccaaactagtagagtcacagacagagaaaaagtcaaagacaggaaggtgatacagaggagagagaagaggaagaggagagactgacaggtgcacaaatcagagaagtcccagagatagcagaaacacacacagagacagagatagagagggagaggtaagccggagacagactcagagattcgcacaaaaagcaacgtggagactcagaagcaagcgcagcgtcaaggaatgctccatttctggtgtgttgttttcccagtattcaagaaatatttattgagtgccaacctgttctagacccaatctcggccaggggatgtggtggcaaatagacggacaagggcctgctctcctgaaacacactggagagataaacaataaataatatcatttcagtaaccaaaaagtgctttaaaaattaagctgaaggccgggcgcagtggctcatgcctgtaatcccagcactttgggaggccgaggctggtggatcacttgaggtcaggagttcgagaccagcctggtcaacatggtgaaacttcatctctaccaataaataaataaagtagctgggtgtgctggtgtgcctgtagtcccagctacttgggaggctgagaaagaaggatcacttgaacccaggaggcagaggttgcagtgagctgagatcgcgccactgcactccagcctgggcgacagtgagtggtaacagaatgacagagcaaggatgactttagatgaggtccttggagtagaccttgtggcagaggtcacagagatgtggattgtgagtaggaaagagaggtgagaaagtctgggggccaggcattccacccaccagaggcagccccaaagcccagaaaagtagcaggtcttcgaggaggcctgtgcggtgagcagatccaccataggacagaggcacagggtaggggctgatcagttagggccttggatccttgggaagaaatctgaattttattctagatctgatgggaagtgcttggagggttttgagcacaggcatgccatgatcatatttttattttcttatttatatttattttgaaaaagagtcttgctctgtctcaggctggagtccagtgggctgatctcggctcactgccaacctccgcctcccaagttcaagtgattctcctgcctcagcctcctgagtagctgggattacaggcatgtgccaccacgcctggctaatttttttgtatttttagtaaagacgggatttcaccgtgttggccaggccaatctgaaattcctggcttcaaatgatccacctgcctcggcctcccaaaatgctgggattacaggagtgagccactgcgcccggcctcatatttttatttaaacaagaacagcagaattacattgctgtgctgagcatacgtagacttcaggagtcaaaggggaaggaaggaggtagcgggctgttgccttcctctggttgctggaggcctggaccaaggtggagttagtgggatggaggaagtggaagaaggcatgggattttggaggctagagcctgcattggtggtgaactggatgtcatagaggagggaaggaaaaggaaccaggaagagaagaactctctgaattgggcacgcacatctctgatgggcaccgatgaggattgttaccaggaacgaggagactgggatcaggaaagtggctttgggagggaggaaccaaggcttctcttttggatgtgtcaagatagatctgccttcgagaaatccgagttgtggtatcaaatagccagttggatatgtgagactggagtttgggggaaagagaggccgtggctcaaaaacgtaagttttggaaacgtcaacataaagccacaggattgggtgacgtggcctagcaggggggtggggacagagaagcgaccctggccagagccttggggacatctacatctgggggagaaggggatgtagcaaaacgagcttaggagtgatctcgaggtaggctgaaaccaggagggttacagagggcaaatgcacctttgtgtttcaagaaggagaggagacagccagctgtgccaagggctgctgagacttggacaaggatgcagagagcagagtgaccattaggtctgatgacatggacagggttggtgatcttgataagataagatgtcagttcagtgcagtggtggggacagaagccctgctggagtggaggggagagagaatttggggggaagacagaaggaaagggaattcaggcaagtgtgtgtgtgtgtgtgtgtgtgtgtgtgtgtgtaactgacacaaaggccaggtgcgatggctcacgtgtgtaatcccagcactttgggaggccgaagtgggtggatcacttgaggtcaggagttcgagaccagcctggccaatatggtgaaaccccgtctctactaaaaatacagaaattagacaggtgcggtggtgcacacctgtaatcccagctacttgagaggctgaagcaggagaatctcttgggcccaggaggcagaggttgcagtgagccaagatcacaccactgcactctagcctgggtgacagagcaagactctgtctcaaaaaagaaaaaaggtaaaaaaaaaaaaaaatgaccctgaaaggaagtagggagacatgcagatagggagatgggaggcagaaaattgcatcctgcaattagctgtcacagcaggcaggagcaagagagatggggaagcccagggccaggaggggaagatgaattcagggggcagggaagagaggatgctgtcagctaggctctggcagatcccctagccagggatgctctgcccagctcctgtctcttgctgctgtcagcgccgggcacactctgggattccccctgtagaccctgtcaagacctattgaggtgaaggggaagaacacgttttcatcattcattttcagaaataaacattcactcagttcttggaaatactttctggccaggcttgggggctcatgcctgtaatcccagcactctgggaggccaagacaggaggattgcttgaggcttggcgtttgagaccagcctgggcaatatagtaagaccccgtctctacaaaaatgaaaaatgagctgtggcgtggtggctcacgcctgtagtcctagatactcgggaggctgaggcgggaggattgcttgagtccaggagtttaaggttgcagtgagctatgattgcaccattgcacttcaggctgggccacagagcaagaccctgtctcagaaaacagaaagaaagaaagtcaaagaaataaagtcaaagacaagaaggtgatacagagaagacagaaaaggaggaggagagagactgacaggtacacaaatcagagaagtcccagagataacaaaaacacaaccacagagatagggagacgtaagccggagaaagacccagagattcgcatagaaagcaacgtggagactcagaagcaagcacagcatcaaggaatgatcaataaaaagaaaaaaaaatatttcctgaggacttccaagtacaaggccctgcaatctcaggccacttctgtcccatctctgccttcagagggggggacaggtagtccagacaattagaatacagagggggctgtgttctgacggggccacgcgggcattgaggaaacgcagcaggcccctcccctagctggggcggggatgtctgtgtgccatcatctcactccatctggtcattcctttgcccattcatccatccattcattcaagtcaccccatgcacattttccaagactgcctgtgacctggccctgtgccgggtagagctgaggatgccaaggtgaattcctcctgtgcctggccccggccccagtctgctggaagaaccagacacagacaatcacactgcggggaaacacgtgctccatcggaaaagtccagagcagggggtgggcagagaggcccagcgtgcaccagagcctcgctcaggtcagcgccaggcctgcctggagcagccaactgtgggagaagaaggagttggtgaaaggtgggtcccacctgggccgtccacagaagggctgaggggtagggggtgaggggttgaagatcaggccctgccgccatgccacacggctgtcctctgtccctgctcctgggggagctgaaactgcatggaaggtcccccaggggtgccccgtctaataaactcgatgaagaggagtgctgctttcattctgtgcccctgacagccggccctgccctgaggcctgcgctttctccaacatggaaatcaggccttccatccttcaagacccagggttctggccccagtctcctccctgaggcccaggactctgggtctgccaacgccttgaccaggagtccaggctccccggccctcctcctccctcagacccaggagtccaggcccagcccctcctccctcagatccaggagtccaggccccctgccccctcctccctcagacccaggagtccaggcccaggccttcctccctcagacccaggagcccaggcccccagcccctcctccctcagacccaggagcccaggcccccagcccctcctccctcagacccaggagcccaggcccccagcccctcctccctcagacccaggagtccaggcccccagcccctcctccttcagacccaggagttcaggccccagtccctcctccctcagacccagaagtccaggcccccagcccctcctccctcagactcaggagcccaggcccccagcccctcctccctcagacccaggagtccaggccccagcccctcctccctcagacccaggagtccagacccccagcccctcctccctcagacccaggagcccaggcccccaacccctcctccctcagacccaggagtccaggcccccagcccctcctccctcagacccaggagtccaggcccccagcccctcctccttcagacccaggagttcaggccccagtccctcctccctcagacccagaagtccaggccccagtccctcctccctcagactcaggagcccaggcccagcccctcctccctcagacccaggagtccagaccccagcccctcctccctcagacccaggagttcaggcccccagcccctcctccctcagactcaggagcccaggacctaggagaccaggttcctctcctctcagatccaagattctgggtacccaggccttcttcctctaccactcagaagtggggtaccgaggcttcttctcccttagggacccaagactcctggcctcaggccctcctccctgagacccggggccctgcctcccgcccctcctccctggtaaccccagtcagacttgctgccccgcccgtctcctgctgcccgggagactgcggagctgggactctcggcgccgctcttgccccttagtgaaatgaaagtcccatcaggctcggccccttcctccccgggcggcctccctccccccttcctcgtccccttaaaacacccgggatccctatggcaacaggcgccgggcgacaggtgcgggtgttatttacgggtcaagcccgaaatagccccgagggtggagggtggagggtggggggtgggcgggtggggacgaggccgggcgcgggcggaggccaggccggtggcggtggcgggcacagccggacgcttcggaggcagcgcggagctggggtcggcgcggggccgaggcaggagagcgagaggggcccctgctcgggagtcgggggtgggagccccgagggggggccctggcctggggctgagcctggcgcgaacccgaccgggaaggccctgggagcccgggggagggagacggactgatcccgaaggggcgcagcgtctcttgcgggtcgcggttggcctttgaaccctggggggactcagtcctggttttccgagccgcagtgcggaccacagccccatagtgtgagccccaggagggcccccggtcccatctgccccagccctcggggaggccccgtagcctcccgcctctggactccactctgtcttccggccaccggccccttttccaggctcagtagagacctcggatcttttctgaatggcaggggagacccctatccccttttcctgaattccagcgaggcccagtcctcttctgagccccagccagggctctgttcttctccttctgtggatgccggggtcctactgcctctcttgagacccggattgaattccgacctccccttgggagcttcccgggaccccaggtcttccttttccgaatcccagagggtccccaagtcctctgttctcaaactctgagcccaagggaaccccggccacatctcctccaaacacacacaggacctcaggtcccttcctgggtaccccaaactcttagccctagtggggtgctcagatctctcaggaaaaccagtttcccttttgttaaccccccagcggggaccccaaagcagccccttggagctgcagggagcttcagcgggcaccagttctcattcctctggagctcttggggggactccctcctgggaagccgaattctatctctaaacctcagggtgggggccttgtttttcctctgggccccgtcttctttgccaagttcttgagggcaacctagaccctcctctgaaccccagaggcttccccagccctggggatcatttttctcttctgaaccccagaagcaatctcgactttcgcatttgagattccagacaggactcggctctccctctttcatacccaggggaaactgagtccctcacccccttcaagaccccaggccgctcctcgctcccgcccctcgaggcccttcgccggctctgcctcctcccccttcccgaccccaccggccataagatgatgtggtccaacttcttcctgcaagaggagaaccggcggcggggggccgcgggccggcggcgggcgcacgggcagggcaggtcggggctgacgcccgagcgcgaggggaaggtgaagctggcgctgctgctggccgccgtgggcgccacgctggcggtgctgtccgtgggcaccgagttctgggtggagctcaacacctacaaggccaacggcagcgccgtgtgcgaagcggcccacctggggctgtggaaggcgtgcaccaagcggctgtggcaggcggacgtgcccgtggacagggacacctgcggccccgcggagctgcccggaggtgagcagccgccgccccgagcgcagggcttgcgtcccacggacagggagggagaggggcccgtgtccgaggagaaaacccgccccagggacaaaagcctgagcccggaggagacagcttgcctcgcagtaagcgccagtgcccacttcgtcctctgctctcagaaactgctgagagatagagggatcccccagatatggcccaggtccctcacgggcctaccgccagagaacctgtgccttagagcttgctttcctgctacagactgtaccccaagaccagaatgtgcctacagggagtctgtgcccccaggccatcctgtacccccagaccaggctgtgacctgagaccccctcagacgagtctgtacccctattctgcacctctaaagagagcttgtgcccccgcctacagcctgtgccccaagaccatcctgtaccccgactatcctgtacccccagatgagcctgtgtccccagctacagtttccacccccagactaacatgcacccctagaccagtctatacccccagaccagcctgcatccttacaccagcctgtgccctcagatcagcctgcacctccacaccaggctatggtcccagatgattctatgacccccaaagtccctgcccccacacagccaatgttcccaggcatcgctgtgtccccccagaccagcctacagctctagagagagcctgtgtcactagaaaaatcttgcctgtgtccccagacccagcctgtgattccagacacagctggtgtcctcagatagcctgtgcccaccccagacagcctgcaccctctggaagtgcctgtgccctggagacagcccgtgcccactctgcatgtgcccacagacagcctgtgcccatggagagacagcctgggttcctggtgtcagcttcctcttcccagcctggagacagcttgcgctcccatcctgtgagccctggggagacagacgcccaccccaaagcaggatctatgcctgttccccacctactgcttccaccaaaccaagctctcaccagacgcctcccaacacccgagggcagaccttgttccttccctgcaatgttcttcacttcctgtcctctcgcctccaaatgcccagactggacatttcagcgtttctcattttctccgagagacattcccatactccctcctttcccaaatcatggctgttttatccctgggcatggcagagagctgttccatacctccctgacacgccacgccacggcttgtgcttataccagggggacattctataccccttgggaactggatgaaatctccttctacctccactgacccatggaaaatacctggcactcctcagagcccatttgggctgtcatatatttgatcacccatatgagatctccagcactcttcagtctccaaagacggtcctatcatcccagtgcccctcaaagaatatggcctatttttctgggctccgtatgagatttccctcgtccctcacttctccagatgtgatatcttatatgtgtagagtgcaaaataggatgtcccaagccctcgataggacagtgggatgccaggccccccggctgtctgagctacccacttggtgtccagatgggctacccttgatcattttatttctgcagatgggctgtctctggcccctcaggggtctcataaaggatgatctcaaacttttgcaaaatgggagtccccagtaataagaatagtagctgcttatgtaatgcctggttctcatctcagtgttttatgtacattaactcatcaagcatcatagctagcctatgagtcgttattatcactcccgttctagagaagagaaaaatgagggggcgagaaatctcggtggctcggtctatgcacccaggctagttagatggaatttgaagcttggttgcctctcttctcaacaactgcattatatcacatctcactggtccatcaagagatcccaaaggtcaaaggtcctgggacaatggaggggtggcccatcccatctcaccgcattgtatggggttccttgcatcccttgctgtcccctccattgatcagaaaggacttcagtcttccagcagggccattaacgttatcttacaaacccaacccctcagaggacatctctcaatcttcattatctcagagaaatatctcacactcaccactgcccatcaaaaggcatccctggctcccttggctataagtatggaatgtgggggtgacccttaccctgcacttttccagatgggatgtgtcatgtttgggggtggtcgaattgggatgtgctaaactattagtagccaaaagaggatgccaggcaacctacattgtcccagaagggccgtcacacttcccttgtggatgtagaccgtgtttcccgcaatgactgcttcaaagagcacctgcacccttcgctcagtgacgtgaagcaccctttacctctttttctttgaaatggagttttgctcttgttgccccggctggagtgcaatggcacgatctcggcccactgcaacctctgcctccaaggttcaagcaattctcctgcctctgtctcccaagtagctgggattacaggcatgcaccacaacatccggctaatttttgtatttttagtagagacggggtttcaccatgttgacgaggctggtctcaaactcctgacctcaggtgatctgcccgcctcggcctcccaaagtgctgggatgacaggcatgagccaccacgcgcagcccagcatcctctacctcttgctgctgcataagaactcacatatcccactcctcctggccggacatctcaccccttcacctcccctcggggtacttggggagcgcccgcccacaccacctcacctgactcagggattgatttcttgtcccttcatatccttgttcaaattgaaaagttcaatttttcacattcatggactgcctggtccctcttctatggcctttactcctgttattctcgacctctcttctctctttctgtgcctcagtttccccatctgtagaataagagagtaggtcaggctaggtgaattctgagggaatttctgggtctaaaatgcacttcagaaagtgctcccctcccttccttcatttctccttccttctctccctttcttcctttttctgtctttcttaactttaaaatttctctctctctctttttttttttgagatgtagtcttgctctgtcacccatgctggattgcagtggtgccatctcagctcactgcaacctctgcttcccgggttcaagcgactctcctgcctcagcctcctgagtagctgggattacaggcatgtgccaccactcccggctaatttttgtacttttagtagagatggggtttcaccatattgacaaggctggtctcgaactcctgaccccaagtgatctgcctgccttggcctcccaatgtgttgggattacaggcatgagccagcacacccggccctgtgctttgttttatattattttttcctcgttcttttccagctcatctctttaatgtgtttgatatacactcacagatatgtattttgacttggaaaatatatagtgttagtttatatgtgtgttttacataaatgagatcatgctattgattttgtctgatctttgggatttttttttttttttttttttttgagatgggatctcactctatcacccaggctggagtgcagtagtacaatcttggctcactgcaacctctgcctcccaggctgaagggatcctcttgcctcagcctcccgagtagctgggattacaggtgtgtgctgccacacccagctgattttttgtatttttggtacagacggggtttcaccacgttggccaggctggtctcaaactcctgagctcaagtgattctcctgcctcggcctcccaaagtgcagggattacaggtgtgagccacctttcctggcctcaatttttggatttttaaattaaattattaatattaattatcattattgttttgatcaacactgtgtttctcaaatctctccatcttgctttaggttattctaattcatggctatatgtactggagagattttcacaaggactgtctgtgtcatttacttgtctgttccccattagatggacacctgacttgattctgactccatgttacttataaacagtgctgctgtaaacatctgcatatatattcctgttttgttttttttttctggagttataccctgcaatgaaattgttgagccacaggctatgaacattcttcatttcataaagtacctcagagtgccttcccaaaagactaggagtacccgttcatacacggtgtttcctcttatcttttcaaacgcttgatatgacccttttaatgttggccaatctaattgatgggaagtggtggctccctgctgattccggctgcctctctctgatccctggtgaagtggggcatctctccatggacttatgagttacccaggcttcctcttttgtgaattactattcataccctttgcccatttgtcaactgggttctctctctcttcttgctaatccgcaggagctctttgtgtgttctaggtaggaatccttcctgagacaggattcctttctgagtctgttagtcttctgctacttgtatcttggtatcctttgttgaatcaagtgattatccatatgtaatcccacttgaccctcaacaaacccatacgaaggggccaggaaagagattattatctcgttttaaagaggaggaactagagacccagagaggctaatggcgcacttggggccacaggtctggggctcagagccccgggtaggagtcccagctcctagatggcagtgtggtcgcaggtggctttcacacctctgggcatcatttttctcctctgtgtatcagggatgctgatgtccaagttttaggctcccgtgggctgttaactgtccagccctgagcttacgcaagggacctcacatcctcatgtctgttttctctctcctgctcccacagaagcaaactgcacctattttaaattcttcaccacgggggagaatgcacgcatctttcagagaaccacaaagaaaggtgagaacttttcaccccctgctgggtgacaggtgggggaaatgctgagcgtgctggaggagttctagagagagttatcccctcctctgctttaccccagggcaggtctcgtgtctataatctgtggctgtcccctggggagtgctggcgggagagttaatgatggggacatggtgctctagagaatctagagaactcttttttttttttttttttgagatgatgtcttgctctgtcacccaggctggagtgcagtggcacaatctcggctcactgcaacctccgcctcccaggttcaagcaattcacctacctcagcctcctgagtagctgagactataggcgcccaccatcatgcccagctaatttttatatttttagtagagatggggtttcaccatgttgaccaggctggtcttgaactcctgacctcaggtgatccctctcctcagcctcccaaagtgctgggatgacaggcgtgagccactgcacctagctgtgcctagagctcttaccccatctctgcctatgccacgttctgtgtcaccccgggcaagtcgcagcccctctctgtgggtagcacttggacatctcacaaacctgcaggcatcaagtactgaccacagtgctgggcactccatctgtaagatctccagtcctcgcagtagccctgcagggtgggggctttatcttccatcttccagaagtccaggaatggttacaattattcttcccaggaaaatttttcaccatgttggccagcctggtcttgaactctcctgatctcaagtgatccacccaccttggcctcccaaagtgctgggattataggtgtgagccaccgcacctggtccacaggaggaaatttaggctgagaagggttcagcctaaattcctactggaatctggaaaatcctactagaatcttccatgtaggaagtagttggtgagatttccaacctggatcattccactgtagcacactgcctttgccatcgtctcccacacaccccactgcctcagcttcctcaactgtaaaccagtggtaaccagatcctaagtaatagttggtaattctcaactctttctaatcctggccctctcctccctttgctcagtgactttagagaaataactgaccctttctgagtcttaattccttcaacagtgtaagtaaaatgttgggctggatgatactctacttgaaaattcttctctcgtcccgaatcttacatcttcctggttctgggttcctatgggtgaatcctcctcattccctacatcccatgttctctgcttctttcctctctcctgctggcagaggtgaatctggcagctgcggtgatagcagtgctgggcctggcagtcatggccttggggtgcctctgtatcatcatggtgctcagtaaaggtgcagagttcctgctccgagttggagccgtctgctttggcctctcaggtgagggttcagagcctggaggctgaggacattgcatgctgggaggatctccaggcactgttgcatgctgggagatggggtctctatgcactgttgcacgctcagagatggaatctctatgcactgttgcatgctgggagtagggtctccacacactgttgcatgctgggagtaggatctccacacactgttgcacgctgggaggtgggatctccaagccctgttgcatgcttggagttgaggggaagcccaagggctatagtaggttcaaagatgggagaaccccaacaaccgggctaaggattggagggtgtccaaacattgttttagatttggacctgggatttccaatcactgttgcatgctaggcattagagaaagcgcaaggactatagaggtctcaaaaattggagagttctaagccctgttgttggctgggaattggaagctgtccaaacgcttttcaaggtttgaacatggagtccccaaacactgtttcatgctgagatgttttaagcactatagcgtgttgagaggtcagggaagcccaggggctatagcaggctcaaaggtggaagagttccaagccctattgttggctcagaatttgatggtctctaaatgctcttttagatttgagacttgaggtctgcaaggactgttgcattcttggagctgaaggtctaaataaaatgctgcatcttgtgaaatgtagccctcagtaataaacaacacttcagtttattgtacttccagttcaaatccttacaacagcactattaggcagggcttactatcccccattttatttacttatttatttttgagacagagtctccctttgtctcccaggctggagtgtaatggcatgatctcggctcactgcaacctccgcctgctgggttcaagtgattcttctgcctcagtttcccaagtagctgggattacaagcaggcaccaccacgcctggctaatttttgtatttttcggtagagacagggtttcaccacataagccaggctggtctcgaactcctgacgtcaagtgatctgcctgtcttggcctcccaaagtgctgggattataggcatgagccaccacacacagcttcccccattttataaatgaggaaattgaggctcagagaagtcagatgaattactcatgggcacacaatcaatgatggcatgatggcagaggtgggattttaaactcggttttctttctttcttttttgagatggagtctcactctgtcgcccaggctggagtgcagtggcacgatttcagctcactacaacctctgcctctaggttccagcccaagctgtgccctgaatcactgtgtggccttgggaaggttccttttattttctgggccttggttttcttcttggatcaaatgttttcttttcttttctttctttttttttttttgagacagagtttcgctcttgttgcccacgctggagtgcagtggcacaatctcagctcactgcaacctccgcctctcaggttcaagcaattctcctgactcagcctcccaagtagctaggattacaggtgtgtgccaccacgcctggctaatttttgtatttttagtagagacagggtttcatcatgttgaccaggctggtctccaactcctgacctcaagtgatccacccaccttggcctcccaaagtgctgggattacaggcgtgagccaccgcgcccggccaagactttcataaaacacttttatatcaacaccttcctgtgcacccccaggggtaatgcaggtgtgagtttaataataacgccagcaccaaattcctaccaagctacaaattccatgaaaacagacatcatctttatctttttcatcgttctgtcctcagggatttagagagggcctctctggggaggtgacattgaagatgtcaaagtatggatagacaagctgggagagtttgctgcattgcagatcttgaaagaaagccagtgtgacaggagtgtggagagagacagggagactggtgtaaaagatgtcactgcattaatgtgacattaatgtcactggtcctgtgacattaacagggaatcaaaaagatctgggttggagtcccaacttcttaacagccatgtaattggggcaaacctttttctatctctgagcttaaatctccttatagccatgaactcactcatccatgtatctgttagtattgtgtccatcctatccatccatccatttatccttccgttgattgatcagtttcctccttctctccccttccttcccctctctctctttccctatgtctctttctatctctctcttttttttttgtttttgagacagggtctcgctctctcatccaggctggagtacagtggtgcaatctcatctcactgcaacttcgacttccaaggctcaagtgattgtcctccctacctttcagcctcctgagtagctgggaatacaggtgcatgccgccaagcccggctaattttcggtttttttgttttttttgttttttttttttttgtagagatagggtttcgctgtgttgcccaggctggtctccaactcctgagctcaagtgatccgcccacctcggcctcccaaaagtgctgggattataggtatgagccaccaagcccggcccctctctcttttctttcttttccaccctctttcccttcctctctccctccaatcatctatttctccttttttttttttttacttgtccattcatttaacaagtatttctttaatatccagtgagtcccagatgctgtgctaggagccgctgaggacgcaacgatgaataaaataaagatgatgtttgttctcatggaatttgtagcttgctaggaatttagtgctggtgttattattgaactcacacctgcattactcctgggggtgcacaggaaactgttgatataaaagtgttttatgaaagtcttgagcacaaaaatgttccacagattgtacaaccaattgagagtgaagaaggatttgatgttgtaattactgtggttagattgcgtgtcagggactggggcaggttgggattttgaggtctccctaaataaagggtcgtgttcaggttgtcttgtttctctccttataatacatatatcagctgttgttctagttttagaggtatgagacagagaagtctgctgccctcgtggatttatagtgcagtgggagagacagaaatgagataaagagacattagtcatacaaatcaatatacattcataactaccaactgtgatgaatgctatagataaaaagtacagagtatgagaaaaatgtatgacaggagacccactgtagatttaggtggcagtggttagtgaaggcgtccctttgaaacatgtacttcatacagagatgtgaagaataaggacatctaagacaggctcagggagggggaggcggaaaattattccaagcagcataaaggtcttcaagcctgaacaaatctggtgcattgaaagtcctgctccacgctgcgagagtgtgggaggagcagcttgagaggaggctggagaagccgcaggagccagacccgcatgcctttttatttattttatttattttttatttttgagacagttttgctctgtcacccaggctggagtgcagcggtgcgatctcggctcactgcaacctctgcctcccgggttccagcgattctcctgccacagcctcggaagtagctgggattacaggtgcctgccaccacacctggctaagttttgtatttttaatagagactgggtttctccatgttggccaggctggtctcgaactcctgacctcaggtgatccacctgccttggcctccgaaagtgctgggattacaggcatgagccaccctgcctagccatccaccagcaaattctattggcactgcttccaaaatgtgttttgaatgcaaacacttccctcggtttcactaatccaagccacggctatatttccccgaggtaatttctatggcctcctaactcttctctatgcttctccttttaacctcctcaagtccattctccacagagcagctagagtgatacttctatttttttaattttaaattttttaagacagggtctggctctgtcgcccaggctgatgtacagtggcacaatcacagctcactgcagcctcaacctcctgggctcaagcaatcctcccacctcatcctcgagtagctgggaccacaggcacacgtcaccactctgggctaatttttaaaattatttgcagagatgaggtctcactatgttgcccaggctaatcttgaattcctggactcaagcagtcctctcgcttcagcctcccaaactattgggatgacaggcatgagccaccgcacccggccaagtgatacttttttttttttgagacggagtttcgctcttgttgcccaggctggagtgcaatggcacgatctcgactcactgaaacgtctgactcctggattcaagcgagtctcctgcctcagcctcccgagctgggattacaggcatgcgccaccacgcctggttaattttgtatttttgtgtgtgtgtgtgtgtgtgtgtgtgtgtgtgtgtgtgtgtgtgtgtgtgtgtgtgtttagtagagatgggctttctccatgttggccaggctggcctcgaactcctgatgacctcaggtgatctgcccgcctcagcctcccaaagtgttgggattacaggtgtgagccaccacgcctggcccctaagtgatacttttatatcataagtcggatcacggattctccccagaataaaagccacttaaattcctactgctagaataacatggtggcaaggcctcgcgcgggctgactcccggcgccctgcgactccctctcctgccacctgctctccctgctccggccacgccagcctctgctgttccccagacgctctaagctcattcctcccgcagcgtgttttcccgggctgcctcctcggcctggagcgttcttccgccggcgcttcacgtgtctcgtttcctcgcattgtttaagtctctggtcaaatgtcaccacctcagagagaccagcactgaccatcgtgtctaaaggggactcatttggtatccaagaaaatgttaaaaataaataaataaataaataaataaaagaggggggcgcggtggctcacgcctgtaatcccaacactttgggaggccgaggcaggtggctcacaagatcaggagttggagaccagcctgactaccatggtgaaaccctgactctactaaaatacaaaaatcagccgggcgtggtggcgggcgcctgtaatcccagctaagcaggaggctgaggcgggagaatcgcttgaacccgggaggtggaggttgcagtgagctgggatcgcgccactgcactccagcctgggcgacagagcgagactccatctcaaaaataaataaataaataaataaataaataaataaataaataataataaaagaaagagcacgtgagagaaactgggcgcggtggctcacgcctgcaatcccagcactttgggagggcgaggtacgtgatcccttgagcccaggagttcgagaccagcctgggcaacatagtgaaaccccatctctaccaaaaatacaaaaactagctagtctcataacctgatctcaaaaaaaaatagataaaaatttaaaaataaaataaactggccgggcatggtggttcatgcctgtaatcccagcactttgggaggctgaggcgggcagatctcaggattaggagttcgagaccagcctggccaacgtggtgaaaccccgtttttactaagatataaaaaattaggcgggcatggtggtgatgcctgtagtcccagctactaaggaggctgaggcaggggaatcacttgaattcaagaggtggagattgcagtgagccaagatcgcgccactgcactccagcctgggcaacagagtgagactccctcttaaaataaaataaaataaaataaaataaaataaaataaaataaaataaaataaaataaaccaggcgcggtggctcactcctgttatcccataactttgggagccgaggctggcagatcacttaaggccaggagtttgagaccaacctgaccaacatggtgaaaccctgtctctactaaaaatacaaaaattagctgggcgtggcggcgggtgcctgtaatcccagcaactcgggaggctgaggtgggaggatcatttgaacctgggaggtggaggtagaagtgagctgagatcgcaccactgcactccatcctgggtgacagagcaagactctgtttcaaaaataaataaataaataaataaataaataaaataagaaagaaagaagactcatttctagctgggactttacctgctttatttttcttcacagaatttatcactacctgaaattctctgcttatttatgcccgtattcatttgccagggccactataagaaagtaccacagcctgggtggctctctatttatttatgcccgtattcatttgccagggccaccataagaaagtaccacagcctgggtggctgtggtacaacagagattgatttcctcaccgttctggaggctggaggtctaagaccaacgcgtccacagggaagttttctccaaggcttctcttcttgtcttgtaaatggccaacttatccctgtatcttcacatggtcttccctctgtactggtctgtgtccccagttccttctttcttttcttttttttttttttttttttttgttgagtcagagtctggctctgtcacccagattggagtgcagtggtgtgatctctctctgctcactgcaacctccccctcccgggttcaagtgattctcctgcctcagcctcccgagtagctgggattacaggcacccgccatgacacccagctaatttttgtattttttagtagagagggggtttctctatgttggccaggctggtctcgaactcctggcctcaggtgatctgcccacctctgcctcccagagtattgggactacagccgtgagccactgtgcccggccttcttttttttattttgttattttattttattttattttattttgtagagacagggtctcactctgttgcccaggctgatcttgaattcctggcctcaagagatcctcctgcctgaaattttttttatctcataaggacaccagtcacattggattagggttccttctgatgacttcgctttaacttaattatctgtttgtgtgtgtgtgtgtttgttttgttttgttttttgagacagggtctcactctgttgcccaggctgaagtgcagtggttcgatctcagctcactgcagcctctgcctgcaggattcaagcgattctcatgcctcagcctcccgagtagctgggattacacgcatgcaccaccacgcctggctaacttttgtatttttagtagggatggggtttcaccgtgttggtcaggctggtctcaaactcctgcgatccgctcgccttggcctcccaaagtgctggaatgacaggcgtgagccactgcacccagccttaacttaattctgtctttaagaactctatatccaaatacagtcatgttctgaggtacttggggtcaggaccccaaaacatcaacttttttgtggaggacacaactcagccctcaacagtgcatttaactgataattgtccatctctccttcttggatgaaactccagaaggacagggatttagttgtagtatcatttatgtatcatattatatgtattttgtaataagagctcaatgaacatctgttgaatgaatcaaagaatgcatgaatcaggtctgctgtggtggctcacacctggaatcccaacattttgggaggctgaggcaggaggattgtttgaggccaggagtttgagaccagcccggggcaatgtagaaagatcccgtctctacaaaataaaatgaaataattagccatggcagcttgcgatgtagtcccagctactcaggaggctgaggcaggaggagggcttgagcctgggaggtcaaggttgcatgcagtgagctatgatcgcgccactgcactccagcctgggtggctgagaccttgtcactaaaaaagagaaaagaaaaaaaaaaaagattgaattaggaaaggaatgaaggggagtccttgtctaaatgcttttccacctcccgttctgtaatgttgggctgcatggagcaaagaaggggcttttaaatcacagcatcctggctgcattctccaggccctgaatcaaaaccacagtgaatggctgggcacggtggctcaggcctgtaatcccagcactttgggaagtggatagatcacctgaggtcaggagtttgagaccagcctggccaacacggtgaaaccccatctctactaaaaatacaaaaatgagccaggcgtggtggcaagagcctgtagtcccagctactcaagaggctgaggcaggagagtctcttgaacccgagaggcagaggctgcagtgagctgagattgcaccattgcactccagcctggatgacagagtgagattccgactcaaaacaaaaccaaaaccggtaaacaaacaaacagaaaaaaacaccacagtggggctggggcgcagggaggaagcagggtcaggaactggggttggggcaggactccagggtctggagagaaggcggctgggatccatgactcatgcgtgactctcagacggtcctgcatgacctggcccctgcccgcccctgcagttccattaccgcctctctccccaaccccaactctccttgctcccaccacactcagcttttctcttttctccaaacactctgtgctgcgtcctacacaggaccctcgcgtcagcacctccttctgctcggaacagccgttgcttcgttttgagcatgactgacttcttttcatccttcaggtcccagctcaaatggcttttctcgacaccatccaaagtccctgctccacccctgggtgccactctctctgtttctatttccttcctttcatgcatcaccctctgagattatcttgtctcctcatttgtttattttggacattgcaacctggcagcctgcaggccctcgatggccaggagatgtgctttgtttgccaggcagtgtgtaaagatttcttcgagttgacgtttaaaggttgggagaattcccataaaaataataatcatttaagcaattataggccgggtgcggcagttcacccctgtaatcccagcactatgggaggccaaggtgagtggatcgcttgaggtcaggagttctagaccagcctggccaacatggtgaaaccatgactctactaaaaatacaaaaattgccgggcgcggtggctcacgtctgtaatcccagcactttgggaggccgaggcaggtggatcacaaggtcagaagttcgagaccagcctggccaacgtggtgaaaccccgtctctactaaaaacacaaaaattagccaggcgtggtggcgtgtgtctgtaatcccagctactcaggaggctgaggcaggagaatcacttgaactggggaggtggaggttgcagtgagctgagatcatgtcactgcgttgcagtgagctgagatcatgtcactgcactctagcctgggcaacagagtgagactccatctaaaaaaaaaaaaaaaaaaattagccaggcgtggtggagcacacctgtagtcgcaggtactcaggaggctgagcatgagaatcgcttgaacctgggaggcggaagctgcaatgagctgagatcatgctgttgagcagctgcagctggcttctgccatcatttctaccttacttgccgccctgtgtgtttacactttctcatgccccctgcaggcatttgagttttgcaaattttggtttatttgtttactgtctatctccaagtaatatataagctccacgagggtagggtctttctctatcatgttctttctttttcttcttttttgctttttttaaaaaaaaaaaatcagcctgtaatcccagctactcgggaggctgaggcgggagaatcacttgaaaccagaaggcagaggttgcagtgagccgagattgccactgcactccagcctgggtgtaagagcgaaactccgtctcaaaaaaaaaataaaaaataaaaaattgcattgcaatatgactttatctttattttgtgacccctccccctctatcactcttttaaaaaacttgcatggagactatttcttttctttcttttttttttttttttgttgcccaggctggagtgcaatggcgtgatcttggctcaccacaacctccgcctcccaggttcaagcaattctcctgcctcagcctcccgagtagctgggattacaggtgcacaccaccacgcccagctaattttgtagtagagatagggtttcttcatgttggtcaggctggtcttgaactcctgacctcaggtgatccacccgcctcggcctcccaaagtgctgggattacaggcgtgagtcactgtgcccggcccaatttttgtatttttagtagagatgggatttcaccttgttggccaggccagtctcaaactcctggcctctagtgatccaatcgcttcagtctcccaaagtgctgggattgtaggtgtgcctggccgctaatggagtcttaatttgaattttgtgttttctgattcctgtgtttgctttaagaaaaaaaagttgtgggaaaatgtgctaaacataaaatgtgtaattttaaccatttcccctttttattttcaatttttatttatttatatatttttaagaattgggatcttgctgtgttgtccaggctggagtgtactggtgtgatcacggttcactgctgcctcatccttctgggctcaaatgatcctcccacctcagcctcctgagtagctgggactacaagcgtgcaccaccacacctggctaattttttaaaattttttttttgtagagatggagtcttgctatgttgcccaggctggtctcaaaatcctggcctcaggcaatccttcgtcctcggcgtcccaaagcgcttggattacaggtgtgagccacagcacccagcctcctcttttatttttagttgacatgtagtacttgtacatatctgtgggaaacagaaggatggtttgatgcatgtaaacaatgcataatgatcagatcagggcaattagcctatccacctcttcaaacttgatcatttcttcatgttgtgaccatttcaaaatcctctcctctagctctttgaaaatacacagccaggcacggtggctctcacctgtcatctcagcactttgggaggccgaggtgggtggaccacttgaggtcaggagttccagactagtctggccaacatggtgaaaccccgtctctactaaaaaaaaaaaaaaaatatatatatatatatatatatacacacacacacacacacaaaaattagccaggcgtggtagcgcacgtgtgtaatcccagccactcaggaggctgaggcaggagagtcgcttgaaccccagctactcgggagactgaggcagaagaatcaggaggcggagtttgcaataagctgagatcgcaccactgcactccagcctgggtgacagagcaagactccgtctcaaaaaaaaaaaaaaaaaaaaaaacaaaacaaaacaaaaacaaaaaactaaggaaccatattcaccctacagtgctgcgaacaccagaacgcgtttctcccgtctagctgtgattctatatccgccttttaatcattttccagcgtacggttctgtggcatcaattccgttcacattgttatgcaactatcacccccatccaccttcagaacgatttgcgtcttccccagctgaaattctatacctgttaaacaccaactcccctttttcctcttccctccggccctcggcaaccatccttctactttctgtctctatgactttgtgtcttgtttttttttttctttatctccagcttcccaaatgctgcctgctatatagtaggtgtttagtaagtatttgttgagtgcacgcgtgggaaggtgccagggtgggcgggagggctgggagcggatggcggagatgttcagacacagctggggtcgcgggcgtctgactgcgagctgtcctctctcccgcaggcctgctgctcttggtgagcctggaggtgttccggcattccgtgagggccctgctgcagagagtcagcccggagcctcccccggccccacgcctcacctacgagtactcctggtccctgggctgcggcgtgggggccggcctgatcctgctgttgggggccggctgctttctgctgctcacactgccttcctggccctgggggtccctctgtcccaagcgggggcaccgggccacctagagccacgcgtgagacttctctaagcaaccaccgagccctttgaccttctccattgtacccccaagatctttttgccccatctcctagagaaactgtgttctccctgctcgggggcccatgtttttttacacgcctgcctcctgtccccttatcctttctccctctgtaaatacgtttttctctgtggctgtatgtgggttgcttgggggtgggatgggaagaggctctttgcaaacgagggtccccagagaagactggcggggacctgatggggtagctggggtgtggggttgggggatgaggtcagggggtcttgggtgggagttgggggccccttcatttcccaggtctggatcgattcacttgccgggagagactttttacaactcatctgcagctccgggtgcggttgggggagatagcgaagggtctggcctcgctgtgatctgatttgggattaaaggtttggaaatttaacaactttgctttggagtctatttgtgatgtgatcgtgcattctggggtaaagaaaagtgaccccatattccctccagaaacataccctccagaaacacttttaagcccagaagtcacatgaaaacgaacccatacacaatggttgagagtgtggaaaacacaatatattttttatttttatttttattttgagacggagtcttgctctgtctcccaggctggagtgtagtgctgcaatcttggctcaccgcaacctccgcctcctgggctcaagtgattctcctgcctcagcctcgcaagtagctgcgtttacaggcacgagccaccatgcccagctaatttttgtattttttttttttttttagaagagacggggttttaccatgttaaccaggctggtctcgaactcctgatctcaagtgatccacctgtctcagcctcccaaagtgctgggattacaggcgtgagccaccgtaccccacccagatttcccctttacacatgactcctgtcatacgtgattaggatttacccccaatgaccttattttaacttgattatctctgtaaagaccgtatctccaaatgaggtcacattcttaggtactgggggttagggtccaacatatatatatatatatacattttgtaggggagaacattcaaccattaacagtgtatatattctaaattgtgttttctggtcgggtgtggcggctcacgcctgtaatcccagcactttgggatgccaaggcgggtggatcacctgaggtcaggagttcaagaccagcctggccaacacggtgaacccccgtctctactaaaaatacaaaaattagctgggtgtggtggcaggcacctgtaatcccagctactcgggaggctgagtcaggagaattgcttgaacctgggagttggaggttgcagtgagccgggatctcgccactgcactccagcctgggtgacagagcaagactccgtctcaaaaaaaaaaaaaaaaaaaaaaaaaatcaaaaaggtggggggaagggggattggttcaggaaagccttccgaagaagatgacgaacttgagtcttcaaggtgagtaagaatcagagaaagtggagaacgtcacgggcgttccagctgggtgggagagcctggacagaaacaagaggaaaaacatgatgaacctgtgagtgaggaaatgtgaacgctggtgttcagagtgagacacaggaaacgtgagagggttggggtgggctgtcttatgaacaaggtggagagactcagatgctcaacagaacagcttggcctttaccctgagggtactgaggagccatgggagcttgctgagcagagacacactggcatcaggtcaaggggttgaaacaaggtttcttattcttgaagtcactaaattgcagacccggaagacagactagtggttgccaggtgttaagaaaagggtgagtcttggccccacgcgacggctcatgcctgtaactccagcaccttgggaggtcgaggcgggtggatcacctgaggtcaggagttcgagatctgcctggccaacatggtgaaaccctgtctctactaaaaacaaacaaacaaacaaaacaaatcaacaacaacaaaacatacaaaaattagctgggtgtggtggctcacatctgtaatcccagcaccttcggaaatgcctgttctaatttaggtccatgggcacaggccctagggtagagcccttgccagagaccctgcccttctctacccagcagttctctgcccccctcccatatcaaaatgctttttctgcatctattgagatgatcatgtgattttatttttatttttattttgcagtctcactctgtcgcccaggctggagggcagtggtgcgatctcggctcacggcaacctccgcctcccgggttcaagcaattcttgtgcctcagccaccccagtacctgggattacaggtgtgcgccaccagacccagctaatttttgtatttttagcacagatggggtgtcaccacgttggcctggctggtcttgaacgcctgacctcaagtgatcgtcccacctccgcctcccaaagtgctggggttacaggcgtgagccaccgcgcccagctgaccatgcgatttttgtttctaattctgcattcttccattcaacaagcagaagtgccccgcagtgcctgggcacctgggagccaggctggtgtgaaagcccagctccccgacctatggctggggcaacagcttcacctctctctgtcttcgttccttcatccctaaagacggtgcgtgagctcaatcctgtacctactcccaggagtcaccgtcgggagtaaacgccatcatgagccctgcaaagctcccaggagaccgcctggcacgtggtcgcaactcgatctgcctttgctgttagtttttctcaagtggcacttacagagtaaacagggacccccgacgacgagctgacagcctgctgatggaaacagatactaatcacatcactgaagtaatgagcgtgcaattataaaccaagttaagtgctaggagacaagagagtccacaattttttttttgttgtttgactttgtgcccagccaggtcagggaagcctcaagagacatctgccatgggggtggcggagatagttggtcttgggggaatggcccttccttccttccttccttccttccttccttccttccttccttccttccttccttccttccttcttttctttcttcctctttctttctttcttctctctctctctctctttctttctttccttctttctttttctttttttttttttgagccgaagtctcgctctgtcacccaggctggagctcggtggtgcaatctcggctcactgcaagctccacctcccaggttcacgccattctcctgcctcagcctcccgagtagctgggactacaggcgcccgccaccaagcctggctaatttttttgtatttttttttagtacagacggggtttcaccttgttagccaggatggtctcgatctcctgacctcatgatccacccgcctcagtctcccaaactgctggaattacaggcgcgagccactgcgtctggcctctctctcttcctccctccctcccttcctttcttcctttttctttctttctttcttttttcttctttctttctttctttgtttctttctctttctctttctctctttctctctctctttctttctttctctctttctttctttcttttcaagatggagtctcactctgtcccccaggctggagtgcaatggcacaatcatggctcactgcagcctcgactttccaggttcaagcgattctcgtgcttcagtcccccaaatccctgggactacaggcacacacagccacagccagctaagtttttgtattttttgtagagatggggatctcccactgttgcctacattggtcttgcacttctggtctcaagtgacccactcgccctggcctcccaaaatgctgggattacaggcatgagctaccgtgcctggccactcttcattaaaaaaaagataaataaatagagatggggtctcactgtgttgcccaggctggtctcaaacaccaaggctcgtatgattctcctgcctcggcctcccaggtacatgaaccaccgcacctggtgggaatggctctttgtccagtggggtcatcattctgaaaactctttcttacccggggtcagggcagggaaggttcaaagccagagactcaagagaaaagggagatggcaattttcccccaaaccctccctgaccacactccgagtggttcccccacggccagttcaggcttcagctctgggtggggagagactggagggaggggaaggcagagatataacatagattgatcagaagtgggagaaggaattacagacctcacaaagacaaatgactggaatcacatcatcctatgaaacaatgtattgttggggctcagaaaacaatacccccgaagtaaggatgacgtttgtcaggtggagcatttgaactaaaggagattagaaggtctcagaggcggccgggccatcatctctacaaaaaatacaaaataactagctgggtatggtggtaagtgtctgtagtcccagttactgaggaggctgaggcaggagaatcacttgaacccaggagatggagtttcagtgagccgagatcatgccactgcactccagcctgggtgacagagtgagaccctgtctcaaaataaaataaaataaataaaataaaataaaataaattagctgctgctgctgctgatgcacagtgctatgtatgagtgttccaacagtagctattttaattaaattaatttttttgagacagggtctctctctttcacccaggctggagtgccgtggcgtgatcacagctcactgcagccttgacctcccaggctcaagtgatcctcccacctcagcctgctgaatagccggaactgcaggtgcatgccaccacaccaggccaatttaaattttttttttaaagagatgagatttcaccatgttgcccaagctggtcttgaactcctgagctcaagcgatctgcccacctcaacctcccgaagtgctgcaattacagacatgagccatcgcgtccagcctattttaattttataacctctcatgaaatctctccttcctcaatttctcttctgagggttctgactttagccggaattggaaagaggcccaatgcttcatgaaggatgacagctggagaagtactagaaggttgcctggcaacagtggtgttagggcagaaaggagcaagtccctgggtggtttcctagcagaaggaatgtgggcagggctgagcctaggaagcaagataggagatgacaagggtgcccagatcatcaacttctgaagaatttctcatccctgcaccccagagcctctggacacagcccatctctcatctctctctctctctctctctctgtctctctctttttctcccctcccttctcatcttttcctcgtcttttttccctttccctctcatccctccctcctcctccttttacttctttcttccttttcttcttcctcttcctccttctcctattactattactactgataataacaatagctaacatttgttaaatgcctcatctgagagattttctttcggggtgattaaaagtttctgatgctaggccaggtgctggggctcacacctttaatcccagcactttgggaggccaagttaggcagatcgcttgagctcaggagttcaagaacagcctgggcaacatggtgaaagccagttccctataaaaaaaaaatacaaaaattagccaggcatggcggtgcatgcctgcggtcccagctactcgggaggctgaggtgggaagatcacttgagcccagaaggtcaaggctgcagtgagctgtgattgcacccttgcaatccagcctggaagacagagtgagaccctgtcttgaaaaaaaagaaaaaaaaaaaaggccaggcgcggtggttcacgcctgtaatcccagcactttgggaggctgaggtgggcagatcatgaggtcaggagatcgagaccatcctggctaacatggtgaaaccccgtctctacttaaaaaaagtacaaaaaattagctgggcgtggtgatgggcacctgtagtcccagctgctcgggaggctgaggcaggagaatggcacgaacccaggaggtggaggttgcagtgagccaagatcacaccacttcactccagtctgggcaacagtgcaagactccgtctcaaaaaaaaaaaaaattttttttcctgacactagatagtggcaatgcttgcacaacattttggaggtacttatgtacttagtatcagtaagtatagtacattttttaaatagttagaatggtaaaatcttgctttaagtaacggtaagattttaccacaaaaataaagtccaggcatgggtaaagaatagtttacgaccactatgaaataaagagaagtgagcatgaggaggttctgaaatgggtatcactccctgataagaagctagaaggaggccaggcgcggtggctcacgcctgtagccccagcactttgggaggctgaggtgggcagatcacgaggtcaggagttcaagaccagcctggccaatatggtgaaaccccatctctgctaaaaatacaaaaattagctgggcatggtggtaggtgcctgtaatttcagctactcggaaggctgaggcaggagaatcgcttgaaccttggaggcggaggttgcctccaagatcacgccactgcactccagcctgggcaacagagcgagactccgtctccaaaaaaaaaaaaaaacaaggaagatagaaggggagaagggagttgttgagctgttgcctcacccttgagcatggtctggacaggacacaatgtgtggagctgccccgggtcatgggtgaccaggaggcaacaggccaaacattgaagacatgagtggtaaaacagaaagggcttggttcttagcaacatgcatgagtttttgcacaaaatcttcctgttaggcaaggtaactaaatatcttttttgtttaggtaatcagttcttcaaaactgagcccatgttgataagttactccaccaaagggtggagtacagtaaagaaatgaggcttgtggttacagatgaagcaatgtctttgagaaaagcccttctttgccacaatcactttttttttttcttttgagacagggtctctctctgtcgcccaggttggagtgcagtggcgtgatcttggctcactgcaacccctttccccctggttcaagcgattctcctgcctcagcctcctgagtagctgtgattacaggcacccaccaccacgcccagctaatttttgtatttttagtaaagacggggttttgccatgttggccaggctggtcttgaactcctgacctcaggtgacccgcccgcctcggcctcccaaagtgctggattaggcctataaaagccattttaactgcggtgagaggatatatgtgtcatgtagtttagccaggcatcgtggtgcacacctgtagtcccagctactcaggaggctgaggtggggggatgacttgagcctggaggctgcagtgagccatgatcgtgtccctgcattccagcctgggcaacagaccctgcctcaaaaaaaatacataaaataaaaattaaactgaaatagggttgccagattcaatgtaggatgcccagttgatttcaaaactcagataaacaacaaataaaatgtttaagtctaagtacagcccccaaactgcatgagatatacttacattcaaaatttttttgtttatctaaaactttaaatttaactgggcatcctgtattttaatgtcccaagtctagcaattctattttaaaagaatccctctgtctgctacgttgagagcagatggtcaaggcgggaaatgaaggtagaagcagggagatggtttaggacgctattgtgatcaggtgagaagggctgagtcagaccagagggtgccagcaaggctgaagacccaccctgttcccagccccgcccctcctgctgcccttaactgatgtgacacaatccttgtgaggtctgtggacagagcgggggaactgcacggaatctgacaatatcaacctaaaaattattcactgcctactcatttcccgtgcaaggacaaacaagagtgctgaaatgcgaggcttgcaaagccacaagatagggagggcttaatcatttgcttgcctgccttatcagtgttacgaaggcattttccaccttccacttccttttccgtttggacaaaaattcaaacttctaggccaggcgcggtggctcacccctattatcccagcactttgggaggccgaggcgggtggatcacttggggtcagcagttcgagaccagcctggccaacatggtgaaaccccgtctctattaaaaatacaaaaattagctgggcctggtggtgcatggctgtaatcacagctatctggaggctgaggctggagaatcgcttgaacccaggaggcgggggttgcagtgagctgagattatgctaccgcactctagcctgggcaatagagtgagactcagtctcaaacaaaacaaaacaaaacaaacaaaaaaaaccacacgcacacacacacactcaaacttcttttattttttgagacagattttcgctcttgttgcccagcctggaatgcaatggcacgagcttggctcactgcaccccccctctcaggttcaagcgattctgctgcctcagcctcccaagtaactgggattacaggcatgcgccaccacgcccggctaactttgtatttttagtagagatgaggtttctctatgttggtcaggctggtctcctgcctcggcctcccaaagtgctgggatgacaggcatgagccactgggcccagctacattcaaacttctttttttttttttgagacggagtctcgctctgtcgcccaagctggagtgcagtggtgcgatctcagctcactgcaagctccgcctcccgggttcacgccattctcctgcctcagcctcccaagtagctgggactacaggcgtccaccaccacacctggctaattttttgtatttttggtagagacggggtttcaccgtgttagccaggatggtcttgatttcctgacctcgtgatctgccccgccttggcctcccaaagtgctggggtaacaggcgtgagccactgcacccggccccacattcaaacttcttatcacaacttgcaaagttctgcatgatccgggcttagcacctcccttctcctgctgtgctctagccggctcactttgcctcagccacgctggcctgtgtccattcttggaactagtactggccaggcttgctcctgccccagggcctttgcctgcgctgtgccttctgcctgaagtgtcattctctttgcatttctcatggctggatacttacactgtttttaattctcagcttcaacatattttcatccaagtcttcccttacccactttgcaaaggaaagacccacctcccatacactcattgtgttatagtgcatccctcttgatttctagcatgtctcttgttacaatctacagtttgttgtttttttctttcagatggagtcttgctctgtcgcccaggctggagtgcagtggtgtgacctcaactcactgcaacctctgcctcccgggttcaagtgattctcgtgcctcagcctcccaagtagctgggactacacgcgtccaccaccacgcccagctaatttttgtatttttagtggagatggggtttcaccatgttggtcaggctggtctggaagtcctgacctcatgatccgccagcctcggtctcccaaagtgctgggattgcaggcatgagccgccgcacccagccaacagtaacagtcttttcaaaatgcctggtccatagtacgtgctcgacaaatatttgtgaaatcactggatacataagacagttccagggaaggggagtagcttgctcagaacagggaagctgcccaggagtctttcccctgattctcagaccacgatcccgtgctcagctcctcgcggattcaaggctgatgaaggcaagggccacactgtcacccactctttgaaagccccaaaccagaagtcattccggggtggctgttcaaggttcttcactgatcaggtctcttggtaacaagtgttggcctcccacaggtacatgtcagcatctccttcctttcagaggctgaatgcttgtccatttatgtagatcccacactttctttacacattcattcattgatggcacttacattgcttccatttcttggtttttgtgaataatgctgttaagaacatcaacgtataaattatctcttccggccgagcgtggtggctcacgcctgtaatcccagtacttcgggaggccaaggagggtggatcacttgggcccaggagttcaagactagcctaggcaacatggtgaaaccctgtctctacaaaagtaaaataaaataaaattaaaattaaaagtagctgggcttggtggtgcatgcctgtagtcccaactattcaggaggctgaagtgagaaggtcgctcgagcccaggaggtcgaggctgcaataagtaagccaagatcacactactgtattactcaccaggcaacagagagagagaccctgtctcaaaaataaatacacagataggctgggggcagtgactcatgcctgtaatccttggcttgggaagccgaggagggtggatcacctgaggtcaggagttcaagaccacccgggtcaacatggcaaaaccccatctctactaaaaatacaaaaattagctgggcatggtgttaggtgcctgtagtcccagctactcgggagactgaggcagcagaatcacttaaacccaggaggcagaggttgcagtgagctgagatcgcaccactgcattccagcctggctgacagagtgagactccgtctcaaaaaatacatacatacatacatacatatctcttcaagatcctgcttggaattcttttgggtatctccccagaaatggaattgctggatcccatggtaattctattttatgagttagaacttgatggcctgaatttttgtggtgtcagctgcagactcacagtgagggaagcccaggaggggatgggctttaagaggatgatgctgcaacagaggggctttagttaacacggatgtgctgtgttcttgagccttcctaagagagtagattgtaagtgttcttaccacacacacaaaaatgataaatgtgaggcaatgcacatgtaaattagctcaatttagccttttcacaacgtatactatttcagcacatcatgttgtacaccataagtacatacaatttttatttgccctaaaaaataaatcagtaatgcttaaaaaaattaaatttcatattgtagggggggaaacagtgcatgatgttgcaatgtactgcgtttcatttcctgaagcgtcagcgaaagaccagccctggggtagaagaccggagcggagggagcgtggcctccccagctccccacttccttctcaagctgcaggctgaactagggtctctggaactgggctaaggcgcccccgtgtctgcagcctctctgcggggcttcatggactccagcaaaaggcttgaggctggaaacgagggtatgagcgtgcggagaggtagggtgaggttgggtttctgcaaggaaataataatcaccgtgcttaactgatgtactaggcaccaggctgaaggccccatcagctggcgaggctgggagagaaattgacatcccctcttgctgccccgccgttggctggaaacagtcatgagccgccacctagcggcgaaaatgacagcaacaacttggacctagagctggggccacggaacgaaaggcgtcatccctttaaattaggacaattgccctctctcagggcagcttctctgttctggttacctgctgacttacacccagtcaccccaaacttcgtggcaaaaaacaactgctatttatccatccatccttccttccttccttccttccttctttccttccttccttccttccttccttccttttatgaggcagagtctcgctctgtcgtccaggctggagtgcagtggtgcgatcttggctcactgcagcctccatctcccgggttcaagcgggattcccctgcctcagcctccctgctagctgggattacaggtacgagccaccacgcccagctaatttttgtatttttagtagagacggggtttcaccacgttggccaggctggtcttgaattcctgaccttaggtgacccgcctgcctcagcctcccaaagtgctgggattacaggtgtgagccaccacgcccggctatagtttatttatactcgtagattctagcagtcaagaatttggacagagtacagcaagggtggttttatctgcagcctcagctgcaaagactggaatggagggtgccggaattatctggaagatctgggagcgtcttcactcatacgtccggtgtctgggctggatgactccacggttgtgcgcagctggaggacagctgacccgagtgcccacacgtggcctctctgtgtgacttgggcttcctcacagcatggtggtctcaggacaggcagacttcctgcatgacgtttggttcagcaaacaaggcagaaggtgaatcaccttttatgatctagactcagaagttgcctctaggctggagtgcagtggtgtaattatagctcactgcagccttgacctcctggactcaagagatcctcctgcctcagcctcccaaatagttggaactacaggcatatgccaccatgcctggataatttttagtttatttgttaaatgtagagacggtgtctattctgactctatcagccgaagcagtcagggactcaccaatatttcagagcaaggagctatagactgcacctgtagaagggagaatgtcagctgggcgcggtggctcatgcctgtaatcccagcactttgggaggccgaggcaggtggattacctgaggtcaggagtttgagaccagcctggctaacatggtgaaaccccgtttctactaaaaatacacacacacacacacacacacacacacacacacacacacacacacacaaaattagccaggcatggtggcgggtgcctgtaatcccagctactctggaggctgaggcaggagaattgcctgaacctgggaggtggaggttgcagtgagctgagatcgtgccattgcactctagcttggacaacaagagcgaaactccatctcaaaaaaaaaaaaaaaaaaagaagagagaatgtctaacaacttgcagctgtgttttaaaactggatgttctccctgaggacttgaatataaagctttgtcagttgcttggtgtggtgaagcaatgagagtgtttttttcgggggaggaggtgtcagatagatcaagaatttataattagcataagaaatgtacttcttaacaaagccagcctgggcaacatagtgagattcccatctctacaaaaaaaaaaaaaaaaaaattagcccagtgtggtggtgcacacctgtggccccagctacttgggaggctgaggcaggaggattgcttgagcctgggaggtcaaggctgcagtgagctatgattgtgccactgcactccagtctgtgtgacagtgcaagaccctgtctcaaaaaataaaaagaaaaaaaaagaaacatactaaaaaaggacacatattagcaatatgaaacaagaacaattttccataaagcaagaggcttatggaaataaaaagtataaaaatacatgatggtaaaaaatatataacattatcctctaacagaataggcagtagggtgggtgccgtggctcacgcctgtaatcccagcactttgagaggctgaggtgggatgatcacttgagaccaggagttcgagaccagtctgggcaacatggtgagaccgtgtctctttaaaaaaaaaaaaaaaaaaggcagaattgatacagctgaagaaaaatgaacaagtaagaaaatgtggtggaggaacttctccaggaagctgatataattatattaagatcagaaaaaataagagaaaagtcatcgtacgatataagggacaggtgtttctcaaaatccaaaatcttctctgctaagagaatcctgattttgtttttgtttttgtttcttgagatgcagtcttgctctgtcgcccaggctagagtgcagtggtgcaatctcagctcactgcaaactccacctcccagattcaagtgattctcctgcctcagcctccccagtagctggattacaggtgctcgccaccacacccagctaatttttgaatttttagtagagacggggtttcaccatgttggtcaggctggtctcaaactcctgacctcgtgattcgcccacctcagcctcccaaagtgctgggattacaggcctgagccaccgcacccagccgagaaccctgattttgttcaggtgtcagttggccacccttgttccttggagacttggcccttttctagtttcaggcatgaatcttgattagtctaaggcttagtgacgtgctggttgtgaaagtgtggtccctgaaccagcagcgtcagcatcacctgggagctcgtcagaaaggcaaattcttgagccccaccccagacctactgaatcagtcagaaactctgaaggtgagcttttcctttctcctcctctccaacctatggtttgacaagtcctccaggtgattctgatgcacactgaagtttaaacacctttagcccagttaggtaaactcacgcccactgctagtggttatttaaggaaggggctggatgcaattgtgtttcttgagatgtgagtggaaatctcgtgggaggcttcctcatgttggagagggccgcgttggaagggcctttctatgcccttcgtctgctttttatctcatcctttccaaaaaattaactttttatttatttatttgagacagagtcttgctcttgtcgcccaggctggagtgcagtggcgcgatctcggctcactgcaacctccacctcctgggttcaagcaattctcctgcctcagcctcccgagtagctggggctacaggcacctgctactatgcccagctaatttttgtattttccgtagagacagggcttcaccatgttggccaggctggtctcaaactcctgacctcaagtgatctgcccacctcagcctcccaaagtgctggcattacaggagcgagccacctcacctggcttaactttttattttaaaatagttctggaggccaggtgtggcagctcacgcctataatcccagcactttgggagtctgaggcagaaggatctcttgagcccaggtgttcaagaccagcctgggcaacatggcaaaatcccatctctacaaaaaagtttttaaaaattagcatttgcctgtgcgtccagcttctcaggaagctgaggcgggaggatcacttgagcttaggaggtcaaggctgcagtgagacaccatactgggattacaggcgtgagacaccactccaggtctgggttctctttttttttttttttttttttgagacagagtctcactctttcgcccaggctgcaatgaagtggcaccatcttggctcacagcaacctccaccccgcagattcaagcgattctcctgcctcagcctcctgagcagctgggattacaggcgcccgccaccaagcctggctaatttttatattttagagatgcccaggctggagtacagtggtgcgatctcagctcaacacaacctccacctcccggattcaagtgattctcctgcctcagcctccccattagctgagattacaggcatgcaccaccacgcccggctaattttgtatttttagtagagacagggtttctctgtgttggtcaggttggtctccaattcctgacctccggtgatctgcctgcctcggcctcccaaagtgctgggattacgggtgtgagccactgtgcccggctgatcttacattttcttgtgcacttattcatgagctttttttttttttatgaaaatgaattcctaccatccattctccttccaaactgctcatacccagtattcccaaggtttttgcacatgtatataacagaatgtcaaagtagattcattgcaatctcagtttctgctcaggcccaaagattatagatgccagcgaggtcagatctcacagtaaggccatttctgcatgacttcaggagaaaatgctgaaaacctaatttccccacacccttggcctcttgtccacctgaaggtaagaaaggagtgttggggggaagggggagggatagcattaggagatatacctaatgctaaatgacgagttagtgggtgcagcacaccagcatggcacatgtatacatatgtaactaacctgcacattgtgcacatgtaccctaaaacttaaagtataataataataaaataaaataaaaataaataaataaataaaaattaaaaaaagaaaaaaaaaagaaaggagtgttgagattagaaggtattttttttcctattgggatacaggtggtgtttggttgcatgagtaagttctttagtggtgctttgtgagattgtggtgtagccatcacccaagcagtatacactgcaccccatttatagtcttttatccctcgcccccctctcacctttccccccaagtccccaaagtccattgtatcattcttatgcctttgcatcctcatagtttagctcccacatatcagtgagaacatatgatgtttggttttccattcctgagttacttcacttagaataatagtctccagagattagaagagtttttgttttgttttgtttctgtgtgtttgtttacgtaagctgttggtgtgctgtgagtcccatcctctgtccaccgtagatgtgtgatggaggatgacagtctcttcaactggacaattcagagtagttatatggggtgaggggcgggtccagagaggaatggggtctgatatggtttggctttatgtccccacccaaatctcatcttgaattgtaatccccaggtgttgggggaggaacctggtgggaggtgattgaatcatggaggtggcttctaccttgttgttctcatgataaagtgagttctcaggagatctgatggttttataagcgtttggcaagttcctcctttgcttgctcttctctctctcttgttgccttgtgaagaagatatttgcttctccttccccttctgccatgactgtagtttcctgaggccaccctagccatgtggaattgtaagtcaattaaatctctttcttttttttttgagactgagcccccctgtcatccaggctggtgtgcagtggtgcaatctcagctcactgcaacctccgcctcctgggttcaagcgattctcctgcctcagcctaccgagtaactgggacaacaggcatgcgccaatagccggctaattttgtatttttagtagaggtggcgttcaccatgttgaccaggctagtctcgaactcctaacctcaagtgatccgcccacctcagcctcccaaagtgctaagattacaggtgtgagccaccacacacggcctcggctatttatagcagtgtgagaacgggctaacacagggtctttcctcactggagagagagggtgggaggagagagagagggtgggaggggagagaggggagaggggagaaatgggggagggggggagaggggggagagagaatgaatatgagaatgaatgtaccaggagcttttatcctttgcaggagcgccacctggaggtaggaggtgaagtctgcagagagaagctggaaatgtactgacggatccccaaggattcagtaatgtgaccaagtggaggagctgcatttacaggcatcaagggaactgcaggtgagaggtctgcagccttgcaagagagtgggggaagcaggagaagctccacgtggggagataaaggaaaagctgaccacgcttcctccacgttgcaggcaacctgccgaaaggattttaatcactgagctgacactgtatttttttcttgtatgtgacttttttaagaagcagctggaagtctttatgacctaagatgactataaaaattatgagaaggccgggcgcagtggctcacacctgtaatcctagcactttgggaggccaaggtgggcggatcacttaaggtcaggagttcgagaccagcctggccaacatggcgaaaccctgtctctactaaaaatacaaaaattagctgggcgtggtagcacatgcttgtaatcccagctgctcgggaggctgaggcaggagaatcacttgaacctgggaggcagaggttgcagtgaaccatgactgcaccatagcactccaggctgggcaacagagcaagactgtctcaaaaaaaaaaaaagttatgagacttgctttacatgtcacccaagggcacaggtaaagaattagacctaggagttgggttgatagggcaatgggaaaaaagaaaaaaattgtttactgaatcaagggaataatcacacctacatctttgcaactcacgtgcttacaactagggcaaccaaattgttccggttcgcccaggattttctctggtttagccctgaaatttctgtgtcctgggaaattcctcatttctattttaaaaccgaaagtcccacatcctaagacacacacacacgcccctgcacacaccaatcctggtaaaacggtaacagttggtcatactatctacaacaaccctattcgagatctgtgtcttcacgatgaggaaaggcacatgcagttctggagattttaacacgtgttcccaaggtcacacaacctgcccttgtatccagcactgaaagcagatgactctcctctttccacgattctaagcctcttcccgtagcatgtcccatgtggaggagaaaagttaagaaaatgaaactggccaaaacttgctactgcatttgtgattttagaaagtaaatgatcagacattattaaaattatcaatgcaaaaagaaagtgagactgaacagattgtttaccttaacaagatcaagttaaactcgtatagggcttatatataatgccgcttaaaagctcaagtttatgcggggcagttttggtggaagaagctcaggcagtccctctggtggtcgttatagatctggccgtggaactggtggatatgaaaacagaaggttctaaaaacagcagaaaagggcaacagttcttagcaggagagacagtgaggaaagctgcaggttacttggagacagtcatcccaaatgcattagaggaggtgtaaaaatctgccacagaaggaacaatgatccatagtcagaaaagttactgcagcttaagcaggaaacccttcttgttcaggactgtcatagccacagtttgcaaaaagtgcagctattgattaatgtgatgtagtgtcaattagaggtacatccctgaggtctttaaaacaaaacaaactcagccaggcacggtggctcacacctgtaatcccagtgctttgggaagctgaggcaggcagatcacctgaggctgggagattgagaccagcctggctaacatggtgaaaccccgtctctacgaaaaatacaaaaattagcccggcatggtggtgggcgcctgtaatcccagctactcaggaggctaaggcaggagaattgcttgaacccaggaggtggaggtttcagtgagccaagatcgtgccactgcactccagcctgggtgacaagagtgaaactccgtctcaaaaaataaattaaataaataaataattagctggacgtggtggcaggcacctgtaatcccagctacttgggaggctgaggcaggagaatcacttgagcctgggaggtggaggttgcagtgaccagagatcgtgccactgaacgccagcctgggcaacagagcaagattctgtctcaaaaacaaaaacaaaaacaaaaaaaggctcaagtttatgaatgaactgttcatatcaggtgatggtctttcaaaataatgactgttttgtaccaactattgtgctcatgtgattgattgaacaatgcttccaaagaatttgaaacaataaggcaaagaaacctaatgttcataacagaaaaaaaaattaaatgtatagcactagaaaaattgatttttttttttttgagacagggtctcactctgtcacccaggctggagtgcagtggtgcaatgatggctcactgcagcctccacctcctgggctccagcgatcctcctgcctcagcctctagagtagcccggactacaagcatgcaccaccatgctcagctaatttttgtatttttagtatagacagggttttaccattttccccaggctggtctcgaactcctatgctcaagcaatcaacttgcctcagcctcccaaagtgctgggattacaggcatgaaccacagagcctggcatgatactagaaaaattctttttttttttttgacatttaagttcaggggtacatgggcaggatgtgcaggtttgttacacgggtaaacgtgtgtcatgggggtttgttgtacagattattttttttctagtgtatttactacttcctgattatcagattattttatcacccagttattaagcctagtacccactagttatttttcctgatcctctctctgctaccaccctccaccctctgacaggccccagcatgtgtgaaaaattcttatagtcttctagaaaatacaataggtagcctttggaacatagggtatcataaagagaagctgtagaaaatatatttctttgaatttttttttttttttttttttacaaatgatcactataatgtttaaaatatgtttaccacctacagttgtgtgctagggaagccataacaaaatgccccccactggggggcttatgggacagaaatggattttctcaccgttctgcaggctggaaatccaagatggaggtgccagtagggtcagtttctcccggggtctctctgctttgtatgcagatggccgccttcttgctgtgtctccacgtggtctttcctctggatgtacatatcctggtgtccttttcttttttttttttttgagttggagtcttactctgttgcccagctggagtgcaatgacacgatctcagctcactgcagcctctgcctcctggattcaagcgattcccctgcctcagcctatcgagtagctgggattacaggcgtgcaccaccgcgcccagctaatttttgtatttttagtagacatggggtttggccatgttggccaggctggtcttgaactcctgacctcaggcgatccgcccacctgggcttcccaaagtgctgaaattacaggcgtgagccaccacacgtagcccctagtgtcttttttatgtccaaatttccttttttcacaacggcctcttgtctctaaatacagtcacattctgagttactgggagttaggattcagcacacgaattttgaggagatgtaattcagcccataattaagccctatcctcatcagactgatgatctgtgctttctctgaactaacaggatttatatattcctttttaacagcaaggaactcaggttctccatggcccctttatgaagttgctcctgctggtacatgaccctcagttagtttcctgaagttatttacaaagccacctccacatgtgttgagcctcttcagtttacttcaaatcctgggcctgtgctgcatggcggtgctttccacagattcatatgttagatcttttctatttttttttctgagacagagtttccctctgtcgcccaggctggagtgcaatggtgtgatctcggctcactgcaacctctgcctcctgggttcaagcaattctcctgcctcagcctcctgagtagcagggactacaggcgtgtgccactattcccagctaatttttgtatttttagtagaggcagggtttcaccatattggccaggatggtctcgatctcttgaccccatgatcctcccactttgacctcccaaagtgttgggattacaggtgtgagctaccgcgcctggccacatattaaatctttttttttttttttttttttgagacagagtcttgctctgtcacccaggctggagtgcaatgatggatctcggctcactgcaagctccgcctcccaggttcatgccattttcctgcctcagcctcccgagtagctgagactacaggcacccgccaccacacctggctaattttttgtatttatagtagagatatgttagccaggatggtctcgatctcctgacctcatgatccacccacctcggcctcccaaagtgctgggattacaggcgtgagccaccgcgcccggcctcatgttaaatcttgacacccaatgtgatctgagaggttgggcctttggtgatggcagcagccactccagacggcttgctgctgccatgacgccacctgccccagggaggcccagcccgggctatacacgctatggagccgcagggagccctgccccttccgagttggggcgggagctcccagggtgatgctacagctgtccaaaccccagctgtggatccgagcctccctcagatcgtatcacatatcaagacttactcttgttgacaaaaagagtcaaactctataaaatatttgaagagatttattctgagccaaatatgataatgaccatggcccctgacacagccctaaggaggtcctgagaccatgtacccaaggtggtcggggggcagcttggttttatacattttagggaggcgtgaggcatcaatcaaacacatttgagaaatacattggtttggtccagaaaggctggacaatttgaaggaggcagggccttccaggctttaggtaaattaaaacattttctggttgacaattggttgagtttgtctaaagacctgggattaatagagaggaaatattcaggttaagataaaagattgtggagaccaaggttcttttgaagtcttatagtggctgcccttagagacaatagatgacaaatgtttcctactcagaccttcaaaagttgctagattctcagttaacctcctcaggattgggaggtcctggaggaaaaagatctagcaatgttaacagagatcctttacatatgcaaatattcccccccaccaaggacagctttgcagggccatttaaaaatatggcaaagaaacatgttttggggtaaaatatttttattttcttctttgttaggtaatgttatgccagagtcagattggaaagtaagtcacgatatatagggctaaataaaacccatctgatgagaatttatggtttgtagggcatgagaccccagaccccttagataagaatctgggcaagataaaaaaaaaaaatcagagctgagtcctcactatggtaattcagtgagtgtgactaccagcatagatgtccataaaggatatccattagggccacccattttaataatgtttgccaggacccttcaatcaaaacaaaatccattctcagaatagcttagaatcaaaggaggactttttgggtttttttggttcaagaaggattgggcaagaaaactgcagggagtgaaggaatgctgagctttggaagcaattagaaccaagaaaacaaaagctgaaagcactgttactcactcccgcttcccggatgctccctgagtcatctttgtgtttctccataaagactggcttcctccacatggcgagacagatggccaccaagaactcccaagcttaaaaaagaatgactctctgtggcaagaaaacaaagagacactcctccccaccttgctactccctatgtggcctccacactgcaacctgggactgtgtagtgaggggagggggagcgaagaagtttgcgttagtctgttttcacactgctgataaagacatacctgagactgagtaatttatttttatttttatttttatttatttatttttttgagacgcactctgtcacccaggctggagtgcagtggcacgatctccgctcactgcaagctccgcctcccggggtcacaccattctcctgcctcagcctcctgagtagctgggactacaggcgcccgccaccgcgcccggctaattttttgtatttttagtagagacggggtttcactgtgttatccaggatggtctcgatctcctgacctcatgatccacccgcctcggcctcccagagtgctgggattacaggcgtgagccactgcgcccagtcagtttactttttaaaaaagaggtataacggacttacagttccacatggctggggaggcctcacaatcatggcagaaggtgaaaggcacatcttacatggtggcagacgacagagaaatgagagagccaagcaaaaggggaaacccgttataaaaacctcagctctcctgagacttgttcactaccatgagaacggcatgggggaatgtgtgggtggaggattagccaggtgctgaggcaagagactgaaggcacaaactgttgcagtataataaagaaaatagaataagaatagtcataatacaaattagatgtagagatgatcatggacaattatcaatcattattataaacattattaatcattagcttttaatattactctttgctgcattactaatataacctaggaataaccggcgggtatagggtcaggtgctgaagggacatggtgagaagtgacctagaaggcaagaggtgagccctctgtcacgcgtgcatcagggccgcttgaggggtccttggtcaagcggtaacgccagtgtctgggaaggcacccgttacttagcagacggtgaaagggagtctcctttccttggaggagtcagggaacactctgctccaccagcttcttgtggaaggctggatattatccaggcctgcccgcagtcatccggaggcctaaacccctccctgtggtgctgtgcttcagtgctcacactccttgtccactttcatgctcctcccgtactcctggctcctctttgaagttcatagtagatagcggtagaagaaatagtgaaagtcttaaagtctttgatctttcttataagtgcatggaagaaaacgctgacgtatgctgccttctccctctctctctgcttcggctacctaagagggaagggccccctctcctgtgatcacacgacttgcttcaccttgtcaatcacttcgaagattcaccctgcttaccctgcccccttatcttgtatgcaataagtatcagcgcgcccagccgttatgggccactaccggtctccgcgtcttgatggttgtggtcctccgggcccagctgttttctctttatctctttgtcttgtgtctttatttcttacaatctcttatctctgcacacggggagaacacctgcaaagccccataggaccctgcaggaatccacccccatgattgaattatctcccactgggtccatcccacaacacatgggaattatgggagctacaactgaagatgagatttgggtggggacacagacacaagccatatatcaaggttgttccttcagatgcagcaatcctgggagcttctggttaggacaagatacaagcagagacagcttcatgggtattgtaaactcaatgtttgtgtcccgacaaaattcagctgttggaacctaaccccaaggtgatggtatttgtaatacgggagctaaaaagaaattattgaggcagacagtgagggtaagagagtcctcagtaaggtttcctattaataaagagcagcccccaaataatttcttttctaacagaaagcagcctgaaacatcaagctgcaagcatagataaacaagctaaaatcttgcatcagctgtgccaatagaaaacggatgcctgggagccgggtatattcaacatggaggttccctcttcccttttctttgtccccacatgtgcagtaaaaaagcagacaacatggccccggccaggcagagaccctacctacgtaataaaagattagggtgggatggccagcttctttgggggctatgcaaacgtcatacctggtccgactaatctctcaggccctatgtaaatcagacagcacctcctcaagcttgtctataaaagccccatgcatttcaccacaaaaccaggggtcccactcgggaacccctctcttctctgtgcaaaagagagaactattctcttttctctttcttttgcttattaagccttcactcttttttttttttttttttttgagatggagtctggctctgtcattcaggctggagtgcagtggcacgatttcggctcacttcaacctccgcctcccaggtgcaagcaattctcctgcctcagcctcccaagtagctgggatgacaggcacccaccactgcgcccagctaatttttatatttttagtagagatggggtttcaccgtgttggtcaggctggtttcgaactcctgatctcaggtgatccgccccccactcggtctcccaaagtcctgagattacaggcgtgagccactgcgcccggcccagtctctttcactatgtaaggacacagcaagaaggtgccagctatgaaccaggaaaaaagccctcagcagacactgaatctaccagtgctttggtcttggacttccagcctccagaaccatgagaaataactatgtgttgtctgtaagctgccaggtctttggtatgttgatagcagcctggatggactaagacactctctccttccctctcatgccctggaccctcatcagggccagaagtggttggggtgatggcccaagcagactttaaaaagcactggcctagcacaagggttggcacgctagagcccacagcttgtttttgcaaataaaattttttgtttttaaaacaactttctgggctgggcacggtggctcacgcctgtaatcccagcactatgggaagccgaggcaggcggatgacttgaggtcaggagctcaagaccagcctggccaacatggtgaaaccccatctctactaaaaatacaaaaaaattagcctggtgtgatggcagaagcttgtaatcccagctactcaggaggctgagacaggagaatcatttgaacctgcggggagaggttgcagcgagctgagatcacgccactgcactctggcgcctgggcgacagagcaagactccatcaaaaaaaaaaaaactttctatagatacataatatttatgcatatttatgacatacatgtgatagtttgatacatgcacagaatgtataatactcaaattagggtatttaggatattcaccacctcaaacatttatctttttttttatcttttcgagacagagtctctctctgtcgcccaggctggagtacagtggtgtgatcttggctcactgcaacctctgcctcccgagttcaagcaattcttctgcctcagcctcccaagtggctgggattacaggtgtgcgccaccacacccagctaatttttgtatttttagtggagatggggtttcaccttgttggccaggctggtcttgaactcctgacctcaggtgatccacccatcttggcctctcaaagtgttgggattacaggagtgagccactgcacctggctcatttatcgtttgtgttgggaatgtttcaaatcttctcttctagctattttgaaatatacaatatattgctgttaactatagtcacccttctgtgctattgaacacttgaacttattccttctatccaactgtgtttgtgcccattaactatcccaccccttctagcctttgataactgactctctctttaccttcatgagatctacttttttagctcctacatgagtgagaacatgaagttgtaaataaagttttattctaacaccgccacacctacttgtttacatatcagcgatggctgctttcatggtacaacagcagagtggggtagtctcagcagagatcctacagcccacaaagctggacgtgttactctctggtccttttgttttctgccctctggtctaggagtttgcagctctgggcgttttttgtttttttttttttttttttttgagatggagtctcactccattgcccaggctggaattcaatggcgccatctcagctcactgcaatctctgcctcctgggttcaagcgattcttctgcctcagtctcccaagtagcggggattacaggcgcctgccaccacgtccaactaattttttatttttagtagagatgggatttcaccatgttggtcaggctggtcttgaactctgacctcagatgatccacccacctcggcctcccaaagtgctgggatgacaggcgtgagcccggccgttttcttttttgcttgttgtgcttcctggagatgctcagtaattcttacattctttcctggatagctggtcaatcattatttattatttccttgaattgttctaggaggaaatgtggggtagaaagagtatggtggggttcttgggcatgaataatccataaataagtcagatttctttttaagacgagaaacttaattttattgatatggacgaagagcaaggaaacacagtatctgcatctccagatttccgataaccttggccagcacgatcccccctcctttagtggccagggctgtcttcttgctacactttcagtgccgcatattcatgagatcctgggggctcctgggtggtgtctgaagctgcctcagacagggcgctggtgcttagctcagcataggtcactccttgggggtctgccgtctttggagaaaatagatgaatattagaactgagtgttcaatatggcagccactagccacacatggctattgacatttaagttaattacaattaaatttaatttaaaacccaggtcctcggtcacaccagatgcatttctttttcttttctgtttttataaccctttatgcctgtgacatcaatggatctgcgtaagccttttttcattttttttaaatttttatttatttatttattttgggacagagtctggctctgtcgcccaggctggagtgcggtggcgtgatctcggctcactgcaacctccgcctcccgggttcaagccattctcctggctcagcctcctgagtagctgggattacaggcgcccactaccacgcccagctaattttttgtatctttagtagagatggggtttcaccatgttaaccaggatggtctcgatctcctgacctcatgatccgcccgcctcggcctcccaaagtgctgggattacaggcgtgagccaccgcgcccggcccatgcataagccttttaaatggagattttggttcccattaggggagtttcgtgacttgtctaagaccacatgcgtgataaacagtatacatttctgtatgggcttaaccaggaggcacacacgaccagcccattgtggtgagggagctcttgtgggactcctaagcgggaggactcaccgagagagataccctttccatattggataaatctgcctctgagtgagaaaggaaaaaaaaaaatcagttctcagctgcagaagtcagaacttagtctttctatccggtgattcccttaaacttcccctgtcccttaccggcagcctcctgctccggaagtttggaatggctggttctgaaagagagagacacacgtgaaaggatgggatgtgaagatttcggggagagggtgagggcaatggaggggagaggaagggagaagaagggagaggaggaaggtcacagaatgggctggggtgggggctcagggtgccaatcccggatgtgccaatgggttcccttgagaatgacatgggaataagtggagcatgagctatgccaagcatctacctcttggtggattcctcagatgatgaacctacaaaaaatgcaggaggaatttacctaccgagaaaatccttcactccccctctctccctttgcgttctctgagctcactgtgctggctgcatctgtagatgatgaagactgagaggaagaggagaaggatggagatgcagctgaagatggcgacaaagatggttctggtgtctggagggggaagagcaggtcagggaatcagcctggctcctgaaatccactgataggggcgagccgaaaagctaagagaagccagacagatggcctggcttccaagcctggatctcccacctcggagctggaacttcctattgctttggggaatttccttaatcttctccaagcttctgtttccccatctgtaaagtgaggatagcagcagtagctactttattggatggtgggtcagtacctatagaaagggctggaacagtgcttggcgcataggaaattccaaaaattcccagggaatgtttggtgcatagcaatgatattgatcatttattgtgagccagctctgttccaggtgctccatatatatatatacgtgtgtgtgtgtgtatatatatatataaatgtatatatatgtgtgtgtatatataaatgtgtatatatatatatatatatatatatatatatacatatatatatatatatacacacttttttttttttgagatggagtcgtgttctgtcacccaggctggagtgtgatcctggctcactgcaacctccacctccctggttcaaacaattctcctgactcagcctcctgagtagttgggattacaggcgtgagccaccacatctgtctgtgtaatcactgtctgaaatccactgatggggtgagtagaaaagctaagagaagccagacagatggcctggcttccaagcctggatctcccaccttggagctggaacttccttggagctggacatttcgaccaatagactttgagtaaagcagatgacccactgtcataggggtgggcctcatccaatcagttgaagactttaagactttaagagaaaagactgaggtcccccaaggtggaaggaattctgcctccagactcaagctgcaatatcaagtctcccctggatcccctgcctgcctgccctgcagatttcagacttgccagctccccacaatcacgtgaaccaatccattaaaatcaatctctctctccatatatgtatatacatgtatatgttctcttttttttttttgagacaaagtctcactcttatcgtccaggctggagtgcaatagtgcaatcttggctcactgcaagctccgcctcccgggttcaagcaattctcctgccttagcctcctgagtagctgggattacaggtgcccaccatcacgcccggctaatttttgtatttttagtagagacggggtttcgccatgttggccacgctggtcttgaactactgacctcaggcaatctgcctgcctcggcctcccaaagtgctgggattacaggcgtgagccaccacacccagcttatatctatatgttctattggttctgtttttctggaaaaccctggctaacacagacatgatctcagctcttaacttcaaacatatttcctttttctttttttaaaggagagagagagatgtgaaaggacgggatgtgaagattatggggagagggtgagggcaatggaggggagaggaggggagaggagggaggtcacagatgggagctcaggatgccaatcccagatgtgccaatgggttcccattgttgcccaggctagagtgcagtggtgtgatcatactcgaattcctgggctcaagtggtcctcctcactcggcctccagggtagctgggagtacagaccaccacgcccagccaacttcaaacacacttcaatgagctcgttgatgccaggtaatgaacagcagtgacacgggcatggaaggcgtttagagtggggaggggtggggctctctgaaggagacatgattccccaagacacagaacaagggatcagctgggagaattcagggaggattcctaataagaacagggttagagcagggtagaaaagaatgaccagtggccgggcacggtggctcacgcctgtaatcctggcactttgggagagtgaagtaggtggatcacttgaggtctggagttcgagaccagcctggccaacatggtgaaaccctgtctctactgaaaatataaaaaataagctgggcatggtggcgcacgcctgtagtcccagctactcaggaggctgagagaagagaattgcttgaacctgggaggcggaggttgcagtgagccgagatcgcatcactgcatcatacactcaactgaccaagactccaactcaaaaaagcatccctctcaggagataaaatttctaccaattaaaaaacaaaaacaaaacaaaacaaaaaaaactagttcttgagcaatattgccatgcaagtctacatcatagcgttttaaagtcttaacaacaaccctgcaaggtagtacaattatttccctcccactggtgaagggcatgcattcccgtgtgactcctgggattacagcaagggttgtgtccaaagctcacagcgttgaggaagagagagcaacctgttactaaagctaggcgacagagtccatgcagttcccccccgttttttgtttttcttggcactttagattcaagaaacacaagtcgtgagactttaaggagtaagtagcagaaacgtgattaaggaaaaaagttgagcaactatagaagtgaggccccagaaaggggcttcaccaagacccccgctatctttgttagtgtgctttgagtctgagaatttttcctaggtgtgcaatgatctgtggtcacattacagagccaagtctgagatgcttcacacgcctggtcctctgcaccaacagagggtctcccatccagacgcttcccctacttggttcgctatgtttgcattggcatttctacatatctatatatagagaattacctatctaatttatctatctcgctaatctatctaccatctgtctaggtatctattatctatctacctatctatctttatctgtctctgtacctacttacctatcatctatccaatctatccgtcctatctaattatgatttatctatctacctacttgcctatcacctatccaatctatctatcctatcatatgtaattaactatctgtctgtctaatttttctatcttgttaatctatcacttatctaggcatctatgtatctatctttatctgtctatccacctgcttacctgctgtctgtctaatctatccatcctatcatatctaattatcacttatctatctaccgacttacctatcatctagttaccaaatctatcatctatctaatgtatctatcaatcataaccagttatctatcatctatcatctatcatctgtatgtatctgtctattcacctactattatctatttaatctattctatctagttatctatctatctatccacctacttatctaatttttctatcttgcaactctatcacctatctaggtatctatgtatctatctgtgtatctgtatatctatctatctatctagctagctttatctagctacctagttacctatcatctatctatctaatctatcatctatctaatgtatctatcaatcatatctaattatctgtctatctaatcatctatcttatctattatatctagttatctatcatctagctagctagctaatctatctgtatctatctacctacttacctatcgtctatttatctatctaatctatcatatctagttatctatctacttacttatctaacctgttgtatctagttatctatctacctacttacctatcatctgtctatctatctaatctgtccatcgtatctagctacttatctacctatcatctatgtatctatctaatctatcatatctagttatctatttatctgcctacttgcctattatctatcacatctaattatctatctatccccctccctgaaataaggttctttctgagctgatcatcagggagcagcaaaaggagtggggagtttgaaacaagacatatttgagttctagtactgggtctcctacctcctgactttgtaaatgttcccttccctttctggaatacgttattttttggttaaatataaggagggggcagagagctaataatatctaacttgaagagttaggtaatgatgaaaaatcctggctttaaagcgctcagtctagaaactgactcattgtgtcggataatgggattgtaggtataatgatgattttttttcacccaatattccacctacacccatctctctctgtaatagattctgtcaatgttcctcaacccatgttccccagatccctttcccatttttatgcattctagatcgtggcttctttccctttccaaagtgaacatttgtatctcttctttgggggactgcctgggagaactccaaatgccttggaatttacatgcccgggacaaactgccactgacggctgtggggaccccagctccctagcctctggtcttcgaccttctctgtctccactgctttctgcaggatggagccaaagataccatctgagggacacagatatcccacacttgtttaatctattttcctcccagcccttcttccccactccctaaaatgtaattttcaagccaggcgtggtggctcacacctgtaatcccagcactttgggaggtcgaggcaggcagagcacctgaggtcaggagttcgagaccagcctgaccaacatggagaaaccccgtctctactaaaaatagaatattagctgggtgtggtggtgcatgcctgtaatcccagctatttgggaggctgaggcaggagaatctcttgaacctggtaggcggaggttgcagtgagccaagatcacgccattgcactccagcctgggcaacaagagcgaaactctgtctcaaaactaaataaataataaataaaataaaacgtcactttcacactaatgctgtctaagagcctgcttctggtggagctgaatcagagaacccctcaaaagcaacaatttttttttttttgagacagtctcactctgtctcccaggctggagtgcagtggtacaatctcggctttggaacctccccctctggggttcaagcaattctcctgcctcagcctcccaaggagctgggattacaagcacccgccacctcaccccgctaattttttatatttctagtagagatgaggtttcaccatgttggttaggctggtctcaaactccagagctcaagtgttctgcccactttggcctcccaaagtgctgggattacataagccaccatgcctggccataagcaacaattctatcagtgcatctccaaggacttatgaaaacagggcaggaacagctgctcctggactctcagtttccccagatggaagcagagaaacagcagccttgccttgtcctttctgttctccccttttccagcctacggtatctttcacacagcaattcactagaaatgagaagtacattattgcaaaattctcatcttcatatgaccccataatcagctgaactgggttcaccctgagatgtccacagatcctggccaaatgttgcatcagtatttgcaaattgccagaataaatcataacttgctacgctactaaagtcagcgtgagcaacaagatacagcctgacacggggcataaatggaggcacaggcaccagaaagaaagtcaagtcttgtgtgataaaattcatcttcattctctacattgcgattgaacatagagtcgttttctagtgtgttttaggcatataaatacaggctggggacatcatacctgtgcttacagatattttacttttattttatttatttactgaaacagggtctcgctctgtcacccaggctggagtgctgtggcgcaatcacagttcactgaagcctcaacctcctgggcgcaaacgatctttctgcctgagcctcccaagtagctgggactacaggtgcacaccaccacgcctggctaatttttgtattttttgtagagatgggatcttaccaagttgtccaggctggtcttgaacccctgggctcaagtgatcctcctgcctcatcttcccaaagtcctggtattacagacgtgagccactgcgcccggcaaagatattttattctgtttagaattgtgatgatacaaatttgaactcaaaaagtacattttaagaaattatataatacccactgggatggctataatttaaaaaaagaaaagtaagtgttgacaaggatgtggagatattggaacccacatatattactggaaggaatataacatgatacagccacaatggaaaatgatttggcagttcctcaaaaagttgaacataatagtcaccatatgtcctagcaaatccacttctaggtacatactcaagataatttacagcgcggagacaaacagatactcctaccacagtgttccagcaccattactcgctttagccaagaggtgcagacaacacaaatgtccatcaaaagaagaacggggccaggcacagtagctcaagtctgtaatcccagcactttgggaagctgaggcgtgtggatcacctgaggtcaggagttcgagaccagcctagccaacatggtgaaaccccctctctactaaaaatacacaaattagctaggcatggtgacgggcgcctgtaggtccagctactcaggaggttaaggcaaaagaatcacttaaacctgggaggcggaggttgcagtgagctgagattgtgccactgcactccagcctgggcgacagagcaagactccgtctcaaaaaaacaaaaacaaaaacaaaaaaaagaatggataagcaaaatgtggtctatccatacaatacgatgcttttcaccatgacaagaaatgaaacattgatgcatgctacagtacagacaaactttgaaaacattatgctaaagagaaaggagctagtcacaaaggatcacatagtgtatgaatccacttacacaaaatgtccagaatagacaaaatcatagacacagagaagcatatgaatggttggaagggcctggtgggaaagtgggaaatgaggagtgactgcttaatgggtacaagattttcttttagggtgatgagaatgttctggaattatgtagtggtgatggttatactacctcatgaagatacaaaatgccagtgaattggacactttacaagggtgaatttttggactgtgaattatatatcaataaaaaaagaaagaaaataaatgatacaagagctcaaaatagaaaagcttctcttcctcctccccctcacacctcactagatctcccacctcgtttctgatacttctgtgttcctctctcccattagatttcatatctttctcagaaaacgttcctgacgtgaattgtgttcgtagtgctagggtagcagacatttcccaagcctactatcatggaataaaaacgtttcaaatagttatcttgcaagaacactttggaggatacctttttgaaaaccgattataccagcacagactgctagcaacaaccttcagcaactttggctctttggagtaggttgcaggaagattatgacttgctgaaaggaaggatgattaagcatctagatgccaatttatattctgcatttggcccttaaagtctggatgagttcctgtttcagccgaatgctgccaaaagctctaactttttaattttttttttttttttttttttttggagacagagtctcactctgttgcccaggctggagggcagtggtgtaatctcggctcactgcaacctctgcctcccaggttcaagcaattctcctgcctcagtcacttgagtagctgggaatacaggcgcccaccacaatgcccagcaaatttttgtatttttagtagagacagggtttcaccatgttgcccaggctggtttcgaactcctgacctcaggtgatccgcccacctcggcctcccaaagtgctgggattacagatgtgagccacctcgcctggcccaaaagctctaatttttatgagaaactctgaggacagaatcttagtcaattgttaatgaataagcaacattagaaaaaaaattcaatattcacctatttttgagaattttagagttataacaaactcttgattatatatattcctgaagtacctactctgcgtaggtcctggtcctactccccaaatgggtcactgaaaaattcacccccattattccccaaatcccaccctagtttttcatcatgtcatatggcaaacaacgcactctgtgctgttttacacaccagcttcttcagaacccggaagcactttagaggttatctcccctcatcctccaccccccaaaacacagcagtttccccaataacattgagaaaatgggctttaaagttcttctaggccgggtgcggtggctcatgcctgtaatcccaacactttgagaggccgaggcgggggaattgcttgaggtcaggagtttgataccagcctggccaacatggtgaaaccccatctctactaaaaacaaaaaacaaaaaacaaaactgagctggatatggtggtgggtgcctgtaatcccagctattcgggaggccgaggcaggagaattgcttgaacccagaacccaggaagtggaggttgcagtgagctgagattgtgccacttcacgccaccctgggggacagaacaagactctttctcaaaaaaataaataggccgtgtgcggtggctcacgcctgtaatcccagcactttgggaggctgaggcgggcagatcacaaggtcaggagttcgagaccagcctggccaacatggtgaaaccccgtctctactaaaaatacaaaaattagctgggtgtggtggtgcgtgcctgtagtcccagctattcgggaggctgaggcaggaaaattgcttgaatccgggaggcgaaggttgcagtgagctgagattgcgccactgtactccagccttggtgacaaagcgagactctatctcaaaaaacaaacaaacaaacaaacaaacaaataaataaagttctccttgtgcactttaagcaaaggtgatcatgaagcagatctcattgggaaaaacatctcctttctaattatcttacctgttttcattgagggagcttcaagttcatcgtgtttatctagaaaataggagggaagaaaaggaattacactaatcatacaggaaccttggggacaggagtcctcacgtcctacttatagacatcctgttcttctttgggaagcagaaaagagaatggcttctccattccctagatgctccctgggtcctcagagcatggacagagcctcagattactcttcttaatagtcctggagtttgatagtatttttaataacaaaaatatttatgaatgaccctgctaacgccccctccagtttgattccttgccagtcttctctatcttgacaaagaacaccattcacccaaattctttctttcttttattttttttgagtcttgcactgttacccaagctggagtgcagtggcatgatctcagctcactgcaacctccgcctcccgggttcaagagattctcctgcctcagccttccaagtagctgggactacaggcgcccgccaccacaccctgctaatttttgtatttttagtagagacagggtttcaccatgttggccaggctggtctcaaactcctggcctcaagtgatcaacctgccttggccactcagaatactgggattccaggcatgagccactgcacctggcctatatttctatctccacagtggcaccatttagtctaagttaaaatatcacctacttggccgggcgcagtggctcacgcctgtaatcccagcactttgggaggccgaggcgggcagatcacaaggtcaggagatcgagaccatcctggctaacatggtgaaaccccgtctctactaaaaatacaaaaagttagccgagcgtggtggcgggcccctgtagtcccagctactcgggaggctgaggcaggagaatggcgtgaacccgggaggcggagcttgcagtgagccgagatcgcgccactgcactccagcctgagggacagagccagactccgtctcaaaaaaaaaataaaaataaaaataaaaatgaaatgaaatatcacctactcaccagtccctggcaaccaccagttgcttctgtgagtttggcttttttagactacacatatgagtgagatcctgcagaatttgtctttctgagtctggcttattttgtttagcatgatatatgcggagatgttgatgaaagggtataagtttccagttctaagatgaagaagttcaggtgctcagcatggtggcaatggatgtgctaattaatttgactgtgataatcattacacaatgtacaggtggatcaaatcatcagattgtataccttgaatatatacaatcttcatttgtcaatttgatatttttaaatttaaaaagtcgtattgcctgaaacgcaccaactcttactacatctagtcccttattttccaaaagcagccagaggccgggcatgatggcctgtgcctgtaatctcagatgcttgggaggctgaggtgggaggattacctgggcctgggaggtcaaggctgcagtgagctgtgattgcaccactgcactccagcctgggcaaccgagtgggaccctgtctcaaaaaaaaaaaaaaaaaaaaaagcagccagtgacccttccagcatataaataaaatcatgccatcctccagctcaacttcatcagtgggttcctgttctttcaaagcagactctaggaccagttcaaacacccacaagatcctagatgctctaggccctgccttatgtcctcctttctgtgtctcaatcattccaggaacactcacacttctgagactttgcttttgctgctctctctccctggagggctgttctccagatatcggtgtggttgggtcattctcatccttcatgcttgtggcagatagaccctaagggggcactcaggagactcaggagccctgcttcctggtgttcatgcctttgtctaatcccctcaccttgagtgtggagatctgtgactttcttctcaccaatagctatggcaaaggtgatgggatgttatgctcttgattatgttacattacataaaactctgtttgctagggcatttgctctctctttcttctctctctctcaatctctcttcttgcaagtgctgcagaatcattctagcatgaatcctacagctataaagaaccagatattgctatcaaccacaggagtggagaaatggacccttccccagtcaagcctccagatgagccagatgagaacacagcccttgttgacaccttgattgcatccttatgagacccaaagcagaggactcagctaagctgtgcctggactcctgacccacatcaactgtgagataataaataggtgtttcaggctgctaaattagtggtaatttgttatgcagctgtagatcactaatacaatgcctctcacagttattctccatctataatgtgttttttaattactctgatagcttgctcttatttctttctttcttccaaagaagaatgtgagctcctgttggccagagacctggtctgtctcagttcctacaatatgctcaggatctaccaaagtatctgaatttgtagggtgaatgggcagctatttttgtgccaggtattttgcattaatttttttttgtaatggaagcatttatatgcccattttgtaataagtaaaaagtagtataataaaaaagtaaaaagtagtataataaagtgatttgcaaagcagcaaacagattgtatatggaaggctgacctggaaaatcaaccactggaaattgatactatagcctgtcttgtgatgtaatggtacagctgcgatagaggtgaagaaatcaggaaacagtagatgatatgccagagaacataattgggaaatggcaaataatcgcgaggcttttagggctaaagtgtgggtgcagaaattcttaagactacaagaacgagttatggggaatacaatttgaaatcaatatcaaagtgatgagcaccttgttggagtatcattgatcaagagcctcagaaagagggtaaatcagaggtgaaacattaagtattcagttactcatcatgccccaagcccaggctaagtcattggtgtggacccacggctacttctacactacactgatgactgtaaagtctctccagggatttcccatgatatggcaggactgacctactggaagcaactgtggtcagttgagaggtattgtttagtgactaataaatgaatggatgaatggatggatggatggatggatggatggatagatggataggtgggtgggggtgagtgaatgggtgaaagggtggatgagtggatgaatgggtggaaggatggacaaatgagtggctgggtaaatagatgggtaggtaggtagatagatggatgaaggggtgggtggacagatgaatggaagggttggtggttggatggattaatggatagatgaatggatggatggatggatggatggatggatggatgagttgatggatagatggataagtgagtggatggatgggtgaatgagtgggtaggagggtggatgggttggtaggtgggtagatgggtgggtgggttgatagatgggtgggtagattgatagatggatgggtgagtagataaatgggtagatgaaagtgatgcaaaattattctttatccctcttccttgggatctcaagtcatgtatgttacaatcctcccacgtgcatcttctcactgtggtcctcatcatttttttttcagttacctgcaccgtgcctcccatacttttccacacaatgggatctcttagccccacaatccattatttgccattcctacatccctcatagagcactggacactctttctggctttccttctctggcataatgaaatataaattttcatttatgtctgaatagcaactgtgaagctcattgtttttgtgacaccggggaggtcacctaatctctatgagcaaaaagaagttagtaacacaaccaccctcataggaagtgaagactgaatgagttagtggaggcaagttacctgtcgtggagacaggaacatagaaaatgctggatacatgtcaaatgccagtgttatcactctatcctcacctgtcacccagatctccagcttgttgctggggaaggaggccaagtgtgatgagttgctcaggtaatacacacagctgtagtttccactgtcattacttgtcacgttccagagcatgaaatcagtctggttttttcttacttgcctgacttgtaatggttctgggatccccattttcaacagagcaattacaatacattcggttccattgtatggagtgagacatcgaagtgtcctgagacctggagtcatcccagggtctacattgactgagagcaaaggttctgggagtgatcctgaagaggacaaggcaatggaggtaaagagaagggccagggcttttccattttctactgcacttggggactatctcatccatctctccgtattaaccatgtctttcatcttctgcatttgatgctttaacatcttggggccttgctgcccttggtgggacctcccctcgcagggttagttaatttctagagccagtaaacaacttgtcctcaaggatgtccctcaaatgcaagccaatagatccagagcccatactctcaaccaccttaattatggggctctcacactcaaggtcaatgttgtcctctcctaatcaccccaggtccaagaactagacaaccagggacagcctctacaccccaaagccaattctttttttgtttttcttttctttctttcttttcttttcttttctttttttttttttttttttttttttgagacaggttctcattctatcacccaggcttgagtgcagtggcacgatcttggctcaccgcagcctctgcctctggggttcaagcaattctcgtgcctcagcctcccgagtagctgaaagcacaggtgcacaccaccacacccaggtaattattgtatttttgtagagatggagtttcgccatgttacccaggctgatgtcaaactcctgacctcaggtgatccaccctcctaggcctcccaaagtgctaggattacaggcatgaaccaccacacctggccaactctaatcttgttctccccacaaaatacaatcaaagctctggtccacagttcttcctcctccctctgcccctcattgaccctggtgcttccccacatactccccccagtatagccttcctcctcctcttgggaactgtaacagaccatcttttccatggcaatcatcacttggtctgtcagtcttaccataccccaattttctattaactgaccatattctacaccaccctcccacatccacatcattgggaccctctcagaatctctgatgagaatcttgctccacattcggttcccatttccacattgaaggtgttgcatctatccttcttcttcttttttttttttagacggagtcttgctctttcatccaggctgcagtgcagtggcacaatctcagctcattacaacctctgccttctgggctcaagagattctcttcctgcctcagcctccctagtagctgggattacaggcgcctgccaccacgcccagctaatttttgtattttaagtagaggtgaggtttcaccatgttggccaggctggtctcgaactcccgacctcaagtgatctgcccacctctgcctcccaaagtgctgggattacaggcatgagccaccgcgccgtgcctggcctgcatctatctttttgtctcctagattccttcttccccagccatgtcccacgacaggaaaagaaatacgtgcatcaggcaggctttggtgactcacgcctgtaatcccagcactttgggaggccaaggcaggaggatcacctgagctcaggagttcaagaccagcctgggcaacatagatcctgtctcaacaagtaatttaaaaattagccaggcatggtggtgcttgcctgtactcccagctacttgggaggctgatgtgggaaaatcgcttgagcctgggaggtcgaggctgcagtgaattgtgttcatgccactgcactcctgcctgggtgacagagcgagattctgtcaaaaaaaaaaaaagcagccgagcgcagtggctcactcctgtaatctcagcactttgggaggctgaggtgggcagatcacttgaggtcagcagttcgagatcagcctggccaacatggtaaaaccctgtctctactaaaatacaaaaattagccaggtgtggtggcgcacccctgtagttccagctactcgggaggctgaggcaggtgaattgcatgaacccaggaggcgggggttgcagtgagctgagatcatgccactgtactccagcctgggcaacagagcaagactccctctcaaaaaaaaaaaaaaggctgggtgtggaggttcacgtttataatcccagccctttgggaggccgaggcagatggatcacttgaggtcaggagtttgagatcaacctcaccaatatggtacaacctcatctttattaaaaatacaaaaattaggccgggcgcggtggctcatgcctgtaatcccagcactttgggaggcggaggcaggtggatcacaaggtcaggagatggagaccatcctggctaacatggcgaaaccccatctctactaaaaacacaaacaattagctgggcgtggtggcgggcgcctgtagtcccagctactcgggaggctgaggagggagaattgcttgaacccaggaggcagaagttgcagtgagccgagatcgtgccactgcactccagcctgggagacacagcaagactctgtcttaaaaaaaaaaaagcaaagccaaaccaaagaaatgtgtgcatcaaagagtacatctgcccttctcacctgtgaccaccagctgcaagtgttcactgctttctgaccactcatgggaggctgttgtcttgtaggcacaaaagtacctcccagcatccttaggcttcaggtccgtgaaggggaattcagcttcgttttctgccgagctctgttcctgcttgtacccagagtcgttcaccttgcgcagcacaaatgtcacattctgggaatgagcctgacacttcagggtcacattgctctcggcttcaaccaccgagctgggccaggcgtggagggagggcttgggcggtttctctggaaacaattcagagttaatttgagtctagaattcagacgattaaaggaaaaggtcatgaagcgtgggatgcaggaataaaagtttaagtaggagaaaactcaccattctttttctcatcttcgtagcccagacacagccctggaagagaaatctcaatgagagaaaaattatgtgcttgtccttgagtacaaatccagcagagaacgtatgactagctctttataggtctgagatatatatatatatataatgtatatatgtattatatataataaatgtattaagtatatgtacacatattacatataatacatatataaatataatatatatattaaatatatgtattacatatatgtatatatttttggcagatatctccccagacttacctcttacttttgttccattgtttgtcattcagaagctacgtgtatggagaaaattccagcaacttcttctttctttttttttttttttttttgaaatgtagtcttgctctgttgcacaggctggagtgcaatgacatgatctcagttcactgcaacctccgcctcccaggttcaagcaattttcctgcctcagcctcccgagtagctgggactacaggcacccgccaccacacctggctaatttttgcatttttagtagagacagggtctcaccatgttggccaggctggtcttgaactcctgacctcaggtgatccacacgcctcggcctcccaaagtgctgggattacaggcgtgagccactgcccccggcccagcaaccttttctgatgtattgaattgctttcatgagtaatcctttcaccatctagaaattgttcaacattcacctatgcttttttctggtattttctgtgattgcagtgttttgttttgttttgagacagagtctcgctgtgtcacccaggctggagtgcagtggtgcagtctcagctcactgcaacctcctccaccccctgggttcaagtgatactcgtacctcaggctccagagtagctgggactacaggtgtgtgccatcgtgcccagctaatttttgttgttgttgttgtagagatggggtttcaccatgttgcccaggctggtctcaaactcctgagctcaagtgatccacccgcctcagcctcccaaagcgctgggattacaggcatgagccaccgtgcccggcctgattgcagttttacccttgccacttaaataatgcaaaggttattttatcgtggagtgagagtggtgggttttttttttttttttatttttcgagatggagtctcgctctgtcacccaggctggagtgcagtggcgcgatctcggctcaccgcaagctctgcctcccgggttcacgccattctcctgcctcggcctcccgagtagctgggactacaggcacccgccaccaagcccagctaattaatttttttgtatttttagtagagacggggtttcactgtgttagccaggatggtcttgatctcctgacctcgtgatccacccgcctcggactcccaaagtgctgggattacaggcatcagccaccgcgcccggccgagaggagggttttcttgctcaattccaatagagagaatctgctcccccttccccgtgtcttctggtcccaaatactctcctcactttagctttggtttccacttacattatcccctccctcttctgtgttctgttctctacattccccgctgggaaggtagcgtcttaaacttgggtggaaaatgggatgtcagtcatggggcttgtttcagggtgaagttacgtagaatttaggtagaaattctctagagccacgacagtgtctcaggacattggttccttgttgacacaggtgccgatacagaacgtgaccccccaccaagcttcaccacagaggaatgaggtggaggcctcacgatggaccgaagctgcgttggcagcgagattagctgggattggcaggtaggaaacagcctctgggtgggcagggcatcccaggactcaggctctgttttgagaccctccccaaatcccgcttttagattcatgtcatctcatctctgctatccacccatcgtctgttcaaacagtgattcctatattcttttttctttttgagacagggtctcactctgtggcccaggctggagtgccagggtgcagtcacagctcactgcagcctcaacctcctgggctcaagtgatccatccatctcagcctcccaaataactgggactacaggcatgcaccaccacgctggctgattttaaaatttttttgtagagatgaggactcacgatgttgcccaggctggtctcgaacacctgagttcaagtgattctcccaccttggcctcccaacatgctgggattacaggtgtgagctacctgcacccagcccaattcccatattctttttcttttctttttttttttttttttttgacatggagtctccctctgtcacccaggctggagggcagcggtgctatcttagctcactgcaacctctgcctcccaggttcaagcgattttcctgcctcagcctcccgagtagctgggattacaggtccttgccaccatgcccagctaatttttgtatttttagtagagacggggtttcaccatgttggccagtctggtctcaaactcctgacctcaagagatctgcccgcctgggcctcccaaagtcctgagattacaggcgtgagccaccacacctggctgatttgtgtttcttgaaaagagaagttcaagttgtaactcccaggacctgcgaatgtgaccttatttgaaaatagcattgtctgatctttgcagatgtaattaattaaactaagatgaggtcatactagagtaggctgggtatctaatccaatataacttacaagaagagaaaaagagagacagagacacacagaaggaagacggccatgcgaagacagaggcagagaggccaggctgcaatcatagtgctttgggatgccaagataggagaattgcttgagcccaggagttggagactagcctgggcaatatagcaagatcccatctctaaaacagaaattattttaattagtccaacatggtggtgtgcacctgtagtcctagctgctcagaaggctgcggggaggactgcttgagctcaggaggttgaggctgcagtgagctatggtggtaccactgcactccggcctgggcaactgagtgagaccctgtctaaagaaaagaaaaaaaaaaacagagccaacgattggagtgatgcatctacaagttaaagaatgccgggagcgctggctcacgcctgtaatctcaacagtttgggaggctgaggcgggcagatcacctgaggtcaggagttcgaggccagcctggccaacgtggtgaaaccctgtctctactaaaaatacaaaaattagccaggcatggtggtccatgcttgtaatcccagctacttgggaggctaaggcaggagaattgattgaacccaggaggtggaggttgcagtgagaaagatcatgccactgcactctagcctgggtgacagagcaagactccgcctcaagaaaaaaaaaaaatgccaagaattgtcagccatcactagaagaggggcataaaacagacgctccttcatagttctcagaaggaatcaacattgcaaacaccttggtttcagacttctcatctccccaacttaaagcaattctaattcctttaagccaccaggcttgtagtactttggtatggcagccattgggggatgaggtcagtctcctggttgcccagcttactgtgctcagcagctggaggcttgggtatgaacccgatagtcatctctaaggcacaaatagccgggtgcagtggctcacacctgtaatcccagcactttaggaggttgaagtgggtagatcacctgagttcaggagtttgagaccagcctggccaacatggtgaaaccccatctctactaaaaacacaaaaaattagccaggcgtggtggcgtgtgcctataatcccagcttctcgggaggcggaggcaggagaatcgcttgaacccaggaggtggaggttgcagtgagctgagatcacaccactgcactccagcctgggagacaaagcaagactctgtcaaaaaaaaaaaaaaatgctcatctaaggtgcaaatgtgtgtaggagacgagcattaccccacaaggaagggctgcacccagaaaaggaggaaggaactgaagcagacgaagcacgtcgatgtccaccgcaccccccgtgcaccagggaggaactggggccttagggaggtggagctctgctgggtcaagcctagagtttctatgtagtaaagccgagattataacccaggtcatccgtttcacagtgtgagctctgtctgaatacatcaggttcaattggaggatggttaaaatcagcctaagaatcgagctggtcagaaaattgtcttcttggggccaggtgtggtggctcacgcctgtaatcccagcactttgggaggctgaggcgggcggatcacctgaggtcaggggctcgagaccagcctgaccaacatggtgaaaccccgtctctacttaaaatacaaaagtcagccgggtgtggtggcctgcacctgtagtcccacctactcgggaggctgaggcaggagaatcgcttgaacctgggagacggaggttgcagtgagcccagatcacgccattgcactccagcctgggctacagagtgagactctgtctcataaataaatgcatacatacataaataaataaataagagagagagagaagaaaattgtctttttgcccacagccttgcaccctgtagatccctaagcccagccctcctctattccgacggaggatgatggcagtactgcggtatttagcggctgcagactcggagaccccacagcagctctgcctttcccagcggagtctgtccccgtgtctctgcagcgcggcctcctcctcgcttgcatgtgggcggcagaactcacagaacccacagcccagacccacccaccgcaggtgtgcaacacctggaagtcattacttccacacaccgcatttccacctggactgccactcccacatgagtttttctcaccagcccaagcccattcgtcccagtcctggagactcaccgaggcaaagcagggagaggaattctgcggtcatagcgtcccttctgccagaaccaaggccccgccttgggttttacccttcaaaggcggagcgggactgggccggccgcagctctccggctgcccggttcgtccccaggatgtgcagatagaggaggttttgctctgacactctggttctctgccccactcttgcagtttccttctcacaaccgactcaggaaacaagaagccgtcgatgataacttcttccccatgaatccggtgtgtgtggccccacccgcccgagctctgtcctaccttatctgaagttctgccaagagttttctgtaaatgtaattttttattttaaaacactaataccggccggacgcggtggctcacgcctgtaatcccagcaccttgagaggctgaggcgggcggatcacctgaggtcgggagttcaagaccagcctgaccaaaatggagaaacccccgtctctactaaaaatacaaaattagccaggcatggtggcgcatgcctgtaatcccagctactccggaggctgagacaggagaatggcttgaacccaggaggcggaggttgctgtgagccaagattgtgccactgcactccagcctggacaacaacggtgaaactgtctcaaacaagcaaacaaacaaacattaatacctatagctttatagcttccgtgtacccactagccagctccccacaatgttaacctttttttggggggcgggggggacagagtcttgctctgtcacccaggctggagtgcagtggcgcgatctcggctcactgcaacctctgcctcatgggtttaaggattctcctgcctcagactcccaagtagctgggattacaagcatgcaccaccacacccagctaattttttgtagagatgggatttcaccatgtgggccaggctggtcttgaactcctggtctctagtgacccgcccacctcagcctcccaaagtgctgggattacaggcataagccactgtgcccggccaatggtaatctcttataattacagtactttttttttttttttttttttttgagacagaatctctgtcagccaggctggagtgcagtggcacaatcttggctcactgcaacctctgcctcccgggttcaagcgattctcctgcctcagcctcccgagttgccgggatgacaggtgtccgccaccactcttggctaattttttttgttctttttagtagaaacgaggttttgccatgttgcccaggctggtctcgaacttctgacctcaggcgatccgcctgcctcggcctcccaaactgctgggattacaggcgtgagccaccacgcccggcgtatggcacattttcaaaaccagagactttgcactggcatcacacgtttaaccaggttccagaggtcactcagatctcaccagtttgtgcataattcgtttctctttttctcttcctcttccttctatttctatttccttttctccttttccttcttttctcctgctcttcctcctcttccaccttcttttcctcctcccttttctttgcctatgggtatagttctgtaacattttattgcctgtatgtatggctttatagaaccaccgccacaatcaagacacagaactgtcccaccaccacgtaggaactccctcatgctgcccctttataatcgctctcccaccctagcacctgctaatctgttctacgtctctatcactttgtcactttgagactcttgtataaatggaatcgtccatcgcctcaccttctgagggtgacctttttcactcagcacaatgcctgtgagattcattcaaatggttgtgtgttatgatgatggatacattagccgggcgtggtggcacacgcccatagtcccagctactcaggaggctgaggcaggagaatcgcttgaacccgggaggcggaggttgcagtgagctgagatcacgccactgcactccagcctgggtcacagagcaagactccatcaaaaaaaaagaattatctaatggatacaatgtgtgtcactgggttagtggatacctgaaagccctaacttcatcattttggaatctatccatgcaataaagttacacttgtaccccataaacgtatacaaataaaaaataatcgtctgggcatgatgacttaccgctgtaatcccagcactttgggaggctgaggcgggattacaggtgtgagccaccatgcccggcctatactttctatcttaataactacaaaaataataacttgctggatgggtccctgtgcccaccccgtcctgtcctaagtgaggaggatgggaagaaagccatcgtcctgtcctggtgcggctctcaaacagctggaaatgctggctgcacaggaaactctaaggatcggcagctctagcgcatgctacccttggcagctgtgtggtctgtggatagagaaggaccaacctgtggttagtggaggaagaggaggaatattgctttgataagcacatcctcagagttataacagaggagacaatagttataaaataagaatgatatttacgaaaaataataagactattaacaagaaacagcaacaaatcttgaaaacaaaatgtaacaacaaaacataaatgttgactttttttttttttttttttttgagacggagtctcgctctgtcgcccaggctgcagtgcagtggtgagatctcggctcactgcaacctctgcctcccgggttccagcaattctcctgcctcagcctcctgagtagctgggattacaggcatgcaccaccacgcccagctaatttttgtatttttagtagagatggggtttcaccatattggccaggatggtctcgatctcttgaccttgtgatccgcccacctcggcctcccagagtgctgggattataggcatgagccacagcacctggcaactgttgacattttacatctgcaccagtaagactggctaccaattacaagcaaatggatgccatggatagaatggaattcctgccaaactgggtaaaatgttggaaacatataaaataaaatgtaaaagaaatgtattataaatacaggctgggcgtggtggctcatgcctgtaatcccagcactttgggaagccaaggtgggcagatcacttgaggtcaggagttcgagaccagcctcgccaacatggtgaaaccccgtctctactaacacacaaaaattagccaggcatggtggtgggcgcctgtaatcccagctacttgagaggctgaggcaggagagtcacttgaacctgagagggaggttgcagtgagctgaaattacgccactgcactccagcctgggtgacagagtgagactccctctccaaaaaaaaagaaagaaagaatgtattataaatacatatgaccaagcacagtggctaacgcctgtagtcctggcactttgggaggccaagatgagaggatcacttgagtccaagagttcgagaccaagttgggccatatggtggaacccggcttctacaaaaaatacaaaatttagtccggcatgatggcacacacctgtggtcccagctactcagaaggctgagatgggaggattactttagcctgggaggtcgaggctgcagtgagccgtgatctagccactacactccagcctgggcgacagagtgagaccctgtctcaaaataaataaatataataaataaataaatatgtatatcccaatattggactaaatgctggtccagaagcacaaaatagaaagaacggagaggaagtattaataaatattacacaggaagcaatgtttttcccttcgtgtggaggaagagttccccgcaggtgagagtcacctactactcaatctgactctgaagttttaagtattgattcaagttatcaaaaatgtattaagggctgggcacggtgactcaagcctgcaatcccagcactttgggaggccgaggtgggctgatcacttgagctcaggtgttcaagaccagcctggccaacatgggtgaaaccccatctctactaaaagtacaaaaattagctgggcatggtggcaggcgcctgtaatcccagcgacttgggaggctaaggcaggagaatcgcttaaacccaggaggtggaggttgcagtgagccgagatcttgccattgcactgcagcctgggtgacagagcgagactccgtctcaaagaaaaaaaaaaaaagtattacgtggctcattgtgcccaattctgtcctctgtccccagtgaaaagtacaggaagaagaaagccaccatcctgccctacagcagatcccaacagagctgagagtgcaggttccacagaaagcggttaaggctcagctggtccaacccatcattccctgggcagctgtgggatctatggctagagaagaacagagctgagcttagaggggaaggaagaggaggaagattgttttctcccggcatccaaacacagcttttcaaccagggggagcaccaccctcacttcccatcgccccatccagggatatttgaaaggtatgagagtagtggcttttttgttgttgttgtttcacaataattaggtctccaacaggtgttcaatgggaaaggaagtattagcaatgtcgagttacgtgttcctataatggacaagacagtctcacatggtgaaggactattgcactttaaacaccatttgtggccatgcccggtggtgcacacctgtaatcccagcactttgggaggctgaggcaggtggatcacttgaggccaggagttcgagaccagcctgaccaatgtggcgaaaccccgtctctcctaaaaatacaaaaaaattagccagatggtggcaggtgcctgtagttgcagccacttgggaggctgaggcaggagaatcacttgaacctggcaggcggaggttgcaatgagccgagatcgcaccactgcactctggcctgggcgacaaagcgagactctgtctcaaaacaaacaaacaaacaaaaaaacaaaaaataccatttgtgcccatgtggagaaacgtgtgaagtccccatggtagagtctgatgtttaaagaaccccatatggattgaatgcacagcagggcggctacagttcacaaggctgcactgggtaattacaatttgctaagaaggtggatcttaaacagaaaggtccataagctagattgagataaccattgtcacaatgagtgaaatttcttcctcggcacacaattaattacttagttagtaggaaagttcccagaaggtggatcttaaacagaaaagtccattagctacattgtgataatcatgtcacaattagtgaaatttcttctttggtacacaattaattatttagtagggaggttcccagaaggtggatcttaaacagaaaggttcgttagctacattgtgatactcatgtcacaatcagtgaaatttcttccttggtacacaataaattacttagtaggagggttccccacccgtaggcttatgggggtataattgataaatcaaaatggaatatatcaaaacatcacgttgtacacaaatataactccatttttatttgtcgattagatctcaataaatctggagcagaagagaattccatatctctacagcagcccatgaaagagagaggggatccgtgttttaacttggatctgttactggaaaggggtcccagtccagaccccaagagagggttctcggatctcacacaagtaagaactcagggtgagtacacagagtaaagtgaaggcaagtttattaagaaagtcaaggaatatggctgctccataggcagagcagtccagagggctgtcagtcggctatttttgtggttatttcttgatcgtatgctaaacaaggggtggactgttcatgagttttccaggaaaggggaggggatttccctggaactgagagtccctccctcgtttagcttctggaagttgccatggcatctgtaagctgtcttggtggcggtgggagtgtcttttagcatgcaaatgcattataattagcaaataatgtgcagtgaggacgaccagaagtcacttttgttgccatcttggatttggcaggttttggctggcttctttgttgcatctttgtgtctttgggtctttgtgacctgtatgttgtgacctgtctcatcctgtgacttagaaagcctcaaccccctgggaatgcagtccagcaggttgcagcctcagtttacccagccccggttcaagatggagtcactctggtttgaaggcctctgattcacctggagacacattccggctgtaccaggcctccaccaggaaagctcccatgataaccacaattacggcagccagacccagtcgtacgaagttacccagggagtagttgctcgatgtggtacctgggggaactgaaagagagaaggggctcagcactgaccctcagagggtatccctccttctcaaatggccccaccaaatctgactatcatcacccacttaatgttttcggttttttggtttttttttttgagacggagttttactcttgttgaccaggctggagtgcagtggtgtaatctcagctcaccacaacctctgcctcccaggttcaagcctccctgcctcagcctcccaagtagctgggattacaggcatgtgccaccatgcccggctaattttatatttttagtagagacggggtttcgccatgttggccaggctggtcttgaactcccgacctcaggtgacccgcccacctcagcctcccaaagtgctgggattacaggtgtgagccaccgcgcccggccacccacttaatgttttctagccagtagtccactgtactttaaagttttaattgaactttttttttttcttgagatcaagttttgctcttgttgcccagactggagtgtaatggcacaatctcagctcactacaacctctgcctcccgggttcaagtgattctcctgtctcagcctcccaagcagctgagattatgagcatgtgccaccacacccggctaattttgtatttttagtagagacggggtttctccatgttggtcaggctggtctcgaactcctgacctcaggtgatccacccgccttggcctcccaaagtgttgggattataggcataaaccaccatgcctggccataattgagctctttaaagttttaatccctgaaaacaaaagatggaatctttgttgttgtttttgagacgacgtctcactctgttgctcaggctggagtgcagcgacgcagtctcggttcactgcaacctccacctcctgggttcaagcgattctcctgcctcagcctcccgaatagctaggattacaggcacctaccaccacacccggctaatttttgtatttttaatagagatgggttttcgccatgttggccaaactggtttcgaactcctggcctcaagtgattcgcctgcctcggcctcccaaggtgctgggattacaggcctgagccaccgcgcccggccaagatatgcaatcctaatgagttgtaatgggagttcctttatcttccttccttgatattcactccaccttagctctcttccttcgtttatttgctctttatcccatttccaccttcccacattgccttttctcctcccgcatccttatgttaaggaatagtcttggggcagcacatgagacggaaggagctctacagagccccgaattccgtggctggatcagcatcctcgcagcacacactgctgtgcagcagtgcacctgagaaagtttgagttgaggccgggcacagtagctcacgcctgtaatcccagcactgtgggaggctaaagtgggaggattgcttgaggccaggagttcgagagcagcctgggcaacatggcgaaaccccatgtctactaaaaatacaaaaaaattagccgggtgtggtggcgggtgcctgtaatcccagctactcaggaggctgaggcaggagaattacttgacctgggcctggggttggggggtggaggctgcagtgagctcagattgtgccactacactccagcttgggcgacagagtgagactccatctcaaagaaaacaaacaaacaaacaaaaccctagcctccagattttcagggaggctgatttgagtaataataaaactctgattggccaggtgcagtggctcatgcctgtaatcccagcactttgggaggcccaagcgggcagatcacgaggtcaggagttcgagaccagcctggccaatatggtaaaaccccatctctactaaaaatacaaaaattagccaggcagggtggcacacatatagtcccagctactcgggaggctgaggcagaagaatcgtttgaacctgggaggcagaggtttcattgagccgagatcgcgccactgcactccagcctgggcaacagagcaagactccgtctcaaacaaacaaacaaacaaaaaaactctggtctcccacttacctggctcaatgtgtattaaactcttttttgcaattcctctgtcttgatgaatgggcttcatccaggcacccggcaagagctgtaatgtaactcattacagcagttacaacagatgaaaaataatttacagagctgaggaagcagagtgctagcacccagtaaggcaggaaacaagatactttcagaagaattctagcagtcaataaaagacatgggtagacttcgcatccacggcatagaagcaggaggctgtgcaaacaccatgttctgaggatgagataattttttttttaaatttgaaactgggtctcactatgttgcccaggctggtctcaaactcctgggctcaagcaattctccagcctcagcctcccaaagtgctgggattacaggcctgagccaccacacatgactgagaaagaattattgagagtgaaatcactaacaccaagaaaaaacaaaacacgccatgcacagtggttcacacctgcaatcccagccctttgggaggccgaggtgagcggatcacctgaggccaggggttcaagaccagcctggtcaacatggtcagaaccccatctctactaaaaatacaaaaattagccaggcgtggtggcgggcacatgtaatcccagctactcaagtggctgaggcaggagaattgcttaaactcgggaggcagaggttgcagtgagctgagatcgcaccactgcactccaccctgggcaacagagcgagactctgtctcaaaaacaaaatgaaacaaaacaaaacaaaaaaccaaaacgctaagagatgcaaagactggtagaaggaatctggtgctggtagattcataattttcaaaaacagcctagaaattttccaaggatgtagtataacaaaaaggcaaaggagggccgggcacggtggctcacacctgtaatcccagcactttgggaggccgaggcaggcagatcacctgaggtcaggagttcaagaccagcctggtcaacacggtgaaaccttcatcgctactaaaaatagaaaaattagccggatgggtggtgcaggcctgtaatcctagctacctgggaggctgaggcaggagaatcacttgaacctggaaggtggaggttgcagtgagcgaagatcgcgccattgcactccatcctggcaacagagtgagactccatttcaaaaaaaaaaaaaaaaaaaaaaaaggcaaaggagtggaaattgtgaaagggaggtttttttgttgttttgttgtttttgtttttgttttttgttttttgtttttgagacagagtctcactctattgcccaggctggagtgcagtggcaagatcttggctcactgcaacctccgcctcccatgttcaagcaattctcctgcctcagcctcccaagtagctgggtctacaggtgcatgccatcatacctggctaattttttatttttagtagagacggggtttcactatgttggccaggctggtctcaaatccttgacctcagatgatccatccacctcggcctcccaaagtgctgggatgacaggcatgagccaccacgccaggccagaaagggaagattttgttaagagcgatgatattgtaagtaatgaagaaatgagattcacagaagaacaaaacaatctctgattaaaaacaacacacacagttcctcaaaaccatacacgcccttacctgtcaccaatatctcaagctgatcactgggttctgaggcccagaagggagactttgtctggtagtacatgcagctgtagttcccagcatcgccggctgtcacgtccaccagagagaagtctatctccttccccgctggactctgcagctggatgggtgatggcgtccctgccttcagtagagcgaacatgataggcacaaacaattggtctcgcttctggcactgcagagtcacccttccacctgcggtcactgtacccctttggtaggttcggaggaaaggtttagataaatgtcctgtaagagaagtcaggttctgaggtcctggggagaagtctggaatcccccactcacccctgttctcctggccggaggctctcgtggagtgtgggaaatgagagattcctgatctcttctaccttcctccacttcctactccgaccccaggacagagattctccctcctacaagacctgtgtaaggcctggcatggtggctcacacctgtaatcccagcactttgggaggccaaggcgggtggatcacctgaggtcaggagttcgagaccagcctgcccaacatggcgaaaccctgtctctactaaaaatacaaaaattagccgggcatggtggcaggcacctgtaatcccagctgctcaggaggctggagcaggagaatcacttgagcccaggaggcggaagttgcagtgagccgagatggcaccactgcactctggcctgggcgacaaagtataaaaccaacatatgcaatttcgttcctgtctctctccctctcccaccacccccaactactctgaaggtgggaccccttttctccctctgttcctccacttcctccctcatcccctgtcccccgtatgtcattggcaggcaccctgtctgtacctgtcaccaacagtagaaggacgtcactgtgctgtgaaaggatgtggggggatgcttttctgtagtattcacaggtgtactctccagcatttctgacttttagattattgaggtgaaattcggccgcgccctctgtagaatcaaggggcttcggggactccagaataattcctcccttcctgagaacaaagctcacacctctggcaggagtccaacatcgcagcgtcacattgctgttggcagggaccaccgagctgggccaggcactgagggacggcttgggcagtgaccctggaaggaagcagagcctgatgctggacccgatgccctcccctgctctcaggaagccctttttaaaatttattattattattattattttgagatggagtctccctctgttgcccaggctagagtgcagtggtgcaatctcagttcactgcaacctccgtctcctgggttaaagcaattctcctgcctcagcctcccaagtaggtgggattacaggcacgcaccaccacacccagctaattttgtattttagtagagacaaggtttcaccatgttggccaggctggtctcgaactcctgacctcaggtgatccacccaccttggcctcccaaagtgctgggattacaggcgtgaacccctgagcccaatcaggaatcccattttaagaagggaagcgggctgggtgcggtggctcacgcctgtaatcccagcaccttgggaggccaaggcaggcagatcacgaggtcatgagatcgagaccatcctggccaacatggtgaaactccgtctctactaaaaatacaaaaattagctgggcgtggtggcaagcacccgtagtcccagctacttgggaggctgagacaggagaatcacttgagcccaggaggcggaggttgctgtaagccgagattgcaccaccgcactccagcctggcgaaagagtgagactccgtcaaaaaaaaaagagaaaaagagggggaaggggaagagaacagcaggggatttgggatgacaggccaaggagggtgtagttgaagaaacactcaccatctccccttgtgtctccttggcccacgcacagtcctgcaagacaatcctccgtgagccagaagcccctacctggagccacgtcaccccctgccctgacccctggagatcgtcccagagtctcctgctgagaacagacccttagaggtcatacgctcaggagttctcattctccccacactggactgtggcttctgctcgacttccagctcctccatcctttcccagagattctccttgaccatcctgtgtggctgtcacctccccctgctccaggcctttcccacaaatccttccattctcatcttctgtttgaaaacagcactcattcttaccatttctttctttctttctttttctttcctttctttctttcttttttctttctttcattcattctttctttcattcattccagagacagagtctcgctctttctttctttttctttctttctttctttctttcattcattctttctttctttcattcattccagagacagagttgcgctctgtcgcccaggctggagtagagtgacgcaatctcggctcactgcaacctccgcctcccgggttcaagtgattctcctgcctcagcctcccaaatagctgggatcacaggcatgcgccaggacgcccggctgagttttgtattattagtagagacagggtttcaccatattggccaggctggtctcgaactcctgacctcaggtgatccacccacctcggcctcccaaagtgccgggattacaggcatgagctttgtgcccagcttctttttattttttaatttttcattttattattgtgttttgagacagggtctctctctgttgcccaggttggagtgcagtggctccatcatggctcactgtagcctcccaggctcaagtgatcctcccacctcagcctcccgagtagctgggatcacaggtgtgcaccaccacacccggctaattttttagtctttcccagagacagagtctccctatgttgcccaggctcatgatctcttttaatcccttcatgactccaaacaggacaaaatttattgtttggtgtcctgtaacaagcctcaaaacatccaaatggtcattccagaaaggggaaagcatacgttcctccctgtttcacacatggctgcatttgctcttcctcctttttaattttttttgatagagacagggctgggctggttaagaactcttgaccatgccgggcgcggtggctcccgcctgtaatcccagcactttgggaggccgaggcaggtggatcacgaggtcaggagttgaagaccagcctggccaacatggtgaaaccccgtctctactaaaaatacaaaaattagccaggtgtggtgatgggcgcctgtgatcccagctactcaggaggctgaggcagagaatcgcttgaacccaggaggcagagtttgcaatgagctgagatcgcaccactgcactccagcctggccacagcgcgagactcagtttcaggaaagaaaaaaaaaagagaaagaaaagaaaaaacataatatcaagcctgtttatgaacattatcataataatgagattgatctaactcaaagaaagttagttaggcctgtgtctctgagagatttcctctttttcccctgtgtgaacagttttaggtctcagcaggaaaaaggagaagttaccaggcgtttgtgctactattacatccatgagccaatccataaactgacacttcaagttttgcaaaaggaaattgtgaacacccaaaatgttcaaacaacgtaagtgtccatccatggaagaatggataaacacagtgtgctctatatattcaatgggatttttcttctttttcttcgttttttttttttttttttttgagacatagtttcattcttgttgcccaggctggagtgcaatggcgcgatctcggctcactgcaacctccgcctcgcgggttcaagtgattctcctgcctcagcctcccaagtagctgggattacagctcactgcaacctccgccttgcaggttcaagtgattctcctgcctcagcctcccaagtagctgggattacagctcactgcaacctccgccttgtgggttcaagtgattctcctgcctcagcctcccaagtagctgggattacaggcatgcaccaccatgcccagctaattttgtattttttagtagagacagggtttcaccatgttggtcaggctggtcttgaactccccacctcaggtgatccgcccatcttagcctccaaaatgcttttttctttttcttttctttctttctttttttttttttttttttttttttgaggcagggtctcgctctgctgcccaggctggagtgcaatgatgtgatcctagttcattccagcatcaactccctgggctcaggtgatcctcccacctctgcctcccgagtagctgggactacagctgcacaccaccatgcccagctcatttttgttgttgttgttgtttttaatatttatttatttattttgagatggagtttcgctcttgttgcccagactggagtgcaatggcatgatctcggctcactgcaacctctgactcctgggttcaagcgattctcttgcctcagcctcccaagtagctgggattacaggcgcccgccaccacgcatggctaatttttatatttttagtagaaatggggtttcaccctattggccaggctgttctcgaactccttacgtcaggtcattgcaaaaaaagtgctgggattacaggcgtgagccaccatgcccagcctcatttttgtattttttgtagagacagggtttcaccatgttgcccaggctagtctcgaactcctgggctcaagcgatctgcctgcctcagactctcaaagtgctgggattacaggtgtgagacactgtgctcggcctacagtgggattttagccataaaaaggaaaggaaatctgacatatcctacaatatagatgtagctcgaggatattatgctgagtaaactaagtcaggcaaaaaagaacaagtgttatgattccactcatacatcctagaataagcaaattcatagagataaaaattagaatgggctggacacggtggctcacgcctgtaatcccagcactttgggaggccgagacaggcagatcacaaagtcaggagatcgagaccagcctggtcaacatggtgaaaccttgtctctactaaaaaaaaaaaaaaaaaaaaacttagccaggcatggtggtgagcgccagtgatcccagctactcgggagggagaggcaggagaatcgcttgaacccaggaggcggaggttgcagtgagctgagattaggccactgtactccagcctgggtgacgaagcaagactccatctccgaaaaaaaaaaaaaaaaaagaaattagaatggaggttaccaggggctgggaggaccgcggcaaatacagagttattggttagagggtgtagcgttcatattgggaattgtgattgttaatttgatttatcagctagaccaggccacaggatgctgggatatctggttaaacattatttctgggcgtgtctgtgagggtgtttttagaaagatcagcatttgaatctaatgctgagtcgggcaggttggccttcctaatggaggtgggtattctgctgagggccaggatgggagaaaaaggtggcagagccaccacagtggctcacgcctgtaatcccagcactttgggaggccaaggcagaagggctgcttgaggccaggagtttgagaccagcctgagtaacatagtgagatcccgtctctacaaaaaatttaaaaattacacggggcactgtggctcacgcctgtaatcccagcactttgggaggctgaggctgaggcgggcagatcacctgaggtgatcacctgagggagctcaagaccagcctggccaacatgatgaaaccccgtctctactaaaaagtacaaaaaatcagccgggtgtgtggtgggcacctgtaatctcagctacccaggaggctgaggcaggagaattgcttgagcccaggaggtggaggctgcagtgagctgtggtcataccactgcactccagcctgggtacagagtgagactttgtctcaaaaaaaggaaaaggagggaaggaaggaaggaaggaaggaaggaagggaaagagagagaggaaggaaggaatgaaggagaaagagaaagaaaggaaggaaggaaggaaggaaggaaggaaggaaggaaggaaggaagaaagcaagcaagcaagcaagcaagcaagcaagcaagcaagcaagcaagcaagcaggcaagcaagcgggggctcacgcctgtaatcccagcactttgggaggccgaggcgggcagatcaagaagtcaggagatggagaccatcctggctaacacagtgaaacctacgaaaaaagccgggcatggtggcgggcgcctgtagtcccagctactcgggaggctgaggcaggagaatggcgtgaacccgggaggcggagcttgcagtgagcagagatcgcaccactgcactccagcctgggcgacagagcgagactccatctcaaaaaaaaaaaaaagaaagagagagagaggaaggaagggaggaaggaaggaaggaaggaaggaaggaaggaaggaaggaaggaagggaaggagaaaaagaaagaaaggaaggaaggaaggaagaaagaaagaggttttagtgtagatagtggtgatggttacacagcggcctcaatttactttatagttatctatttgacactaaatttttatttatggtattaaggtttctgggccaggcacagtggctcacatctgtaatcccagcactttgagagactgaggtgggcagatcacctgaggtcgggagttcgagaccagcctggccaacatggtgaaacaccgtctctactaaaaatacaaaaattaaccaggcatggtggcgcacccctgtaatccagttactcaggaggctgaagcaggagaatcgcttgaacccgggaggcagaggttgtggtgagccgagatcacgccattgcactacagcctgggcaacaagagcaaaaccctgtctcaaaaaaataaaataaaataaaataaaataaggtttctattctgaatacttttacttacacacaaaaagtcagagttgatcctgagaaaaggggtaagccaatgaagccaggtggtggaggcattcagcaaaactcacgaagttgaaactacaggagttgaagtttgcagagcactcgtttccagggaatgtctgcagtgcactcagcaggacgtctcactcctcccgtgtgctcagtaagccaaagttgatgttattatttccatccccagcccaactatcccaccagttccatgattttctgcagtcccagtggatagccctgtgagacttactgaaacagaggagggaaagcagcttagggatcatgatggctccttagccctcccagagtccgtcttgggttctgcagtccacagatgggagaagagctggagtcgtcgctgcctctctcccaccccagagtgtgggcagtaacagcctttcctagcctttcagtttcccctcccatatccacattcaggaaacatgttgatgttgctgattgcaacatgctccttacacacaccagtgttcgagcacttgactcacaggaaatgctcctctgtctcaggcagatttcaggcatcaaacaggtaaccccgaaaatgcttcagacttggccctgaagggttcgtattgaagagatgaaagcacttcactcttttttttttttttgagatggtgtctggttctgttacctgggctggagtccagtggcacgatctcaggtcattgcaacttcagcctcctgggttcaagcaattctccggcctcagcctcccaagtagctgggattataggcgcatgccaccatgcccggctaatgtttgtatttttagttaagatgaggtttcacaagttagctgggctagtcttgaactcctcgcctcaagtgatccacctgcctcggcctcccaaactgctgggattacaggcatgagccactgtgccaggccttcatcaccattttttttttcttttgagacagagttccactctttcgcccaggctggagtgaagtggcaaaatctcatctcattgcaacctccaacccccaggttcaagcggttctcctgcctcagcctcccaagtagctgggattacaggagcccttcaacacgcccagttaatttttgtattttttagtagagatgaggtttcaccatgttggccaggctggtctcaaactcctgatctcaagtgatccacccacctcagcctcccaaagtgctgggattacaggcatgagccactgtgcccagccagtcatgagctcattttttaagttcagaatatttcagtacatatctatctttatcaaataagaaccattttaaaaataatataagcaccacagcactgtcacatcaagaaagttaagagtacctccttgataccagctaatacccattcagtactcaaatttccctgattgtctcaaaaatgtcatttctatcaggtttttaaagaataaatcaggatccaataaaagtctacagattgcatttgataattatgttaatttagcctggcgcagtggctcatgcctgtaatcccaacactttgggagaccggggcaggtagataacctgaggtcaggagttcgagaccagcctggccaaccatggtgaaacctcatctctactaaaaatacaaaaattagctgggcgtggtggtgcacgcctgtaatcccagctactcaggaggctgaggcaggagaactgcttgaacctgggaggcaaaggttgcagtgagctgagatcgcaccattgcactccagcctgggcaacagagtgagactcagtctcaaaaaaaaaaaaaaatgttaatttgaatcagacaaaattttttatttttttgttaaaataagaaatcaagcaagttagtttttaaccatgttttttttcatcttgcatttggaagaagagcaaaatgccccgaagtctcgtttttgttttcggattttttgtcttgatagcacctactcttcttactgttttggaacatagaaaagtcaacaaggcaacaaattataaggagtaaaaccaactataattacaggtgtttctttgaaagttattttcacaagatgtggcaatgatttttaaaggcttgggactcttacaagacccttttgttcaaataacagttttgtgtatgaatttatttcaacagagaacaatttagtaatgtttgtgaatattcatttagttctccatattgtaccagaaaacaagactgatattcttgtgaatcttctcaattcaactctttatcaaatcagattccttaaattagtgttgtgactcagaaaaaatctttctccttatgcagtatcagggaaaagaggacatctcctatatttcttcttaacatctctgttgctaacaaggaatatgcatattttaaaactaggctctggaattttatcagtcaacaggaaaggcctggtaaagttccattccacttggaaatgaagaaaggagaccctgattcaaaaaacgaaaaaagaaagaataaagaatagcttagggccaggcaaggtggatcacacctgtaatcctaagattttgggaggtgaggtaggtggaaggcttgatcccaggagttcaacaccagcctgggcaacatggcctaatcccatctctacaaaaaatacaaaaattagccaggcttggtggtatatacctgtaatcccagcttctcaggaggctgaggtgggagaatcacttgaacctgggagggggaggtggcagtgagctgagatcgcaccattgtaccccagcctgggcaacaagagtgaaactccatctcaaaaaataataataaaataaataaataaataatcattcactttgttaggtgtttatcacacctaaccttaagaatatgttaccaaaataaaaagtcttatagatgaaatcatattatatctgaggtttactttaaaatactccaggagaaaatttaaaatagacttgggggaggggacttatctgtagttatctgcacataatctacatgattatctcaaagccatccttttgctgttgagaattctgatttttagctgggcccattggcacccaggtaaaaaactacattcttcagtgtcacttacaggtagatgtagccgtaagtcttcatctaggacaatgataaataagcataaatattgtagacagcttccaaaaggttctttaatgaagtacactttccttccttcacttaactgcctaaaatgtggatgtgatgactggtattctagcgtcatcttgaaccatgaagatgagatgaggttcaagatggtggagggtgagccagaagtaacttaggtccataatgctttttggagtcactgtgccagccttggactgctcccttcagatttattctacataagggagaaatcaattggtattagttttaagtcatcattatttagttctcttttgggtttaggttatcaattactgtgttaacaaaccaccccaaaactgagtaacttagagtaacaatcttgtttttttttttttttaatcattcctgatctggtgagatgactgggctcagttgagcggttcttcggttcaatgtgatgtcttcctgggcttcagtcatcagggtggctcaactgagctggaatctccaagatggcacttgcaaatggctggctgttgatgctggatgttggttgaaagctcggctaggactgttgaatgatgtacctgcacatggcctctccatttgattcagacttcttggaggatagcatctgggtttcaagaggggatgtcacaagagagctttctaaaatagagaaggcggctgggcatggtggctcacgtctgtaatcccagcactttgggaggccgaggtgggtggatcacctgaggtcaggagttcaacatcagcctggccaacatggtaaaaccccgtctctactaaaaacaaaattaaaaaaaattagccgggtgtgtttgtgcacacctgtaatcccagctactcaggaggccgaggcaggagaattgcttgaacctgggaggcggaagttgcagtgagccgagatcacaccactgcactccagcctgggcaacagaatgagactctgtctcaaataaataaataaataaataaaataaagaaggcaaaagttgtttgtccctttaaagactaagcctggaactgacacagtttctcttcttctacagtcttaaggaaaggccagattcaaggggagggaaaataaactctacctctctatagggacagtgacaaagaattggaggccatctttagtctgtcatgtgttatggtcaatggaaatagatatatatatatttactgagtgcctgagtcccaccgagagattttaattatttttttatttttgtttttttaagatggaattttgctcttgttgcccaggctgaagtgcaatggcatgatctcagctcactgcaacctctgcctcccgggttcaagcgattctcctgcctcagcctcccaagtagctcggattacaggcaagtgccaccacacccagttaattttgtattttttagtagagatgggatttctccatgttggtcaggctggtcttgaactcttgacctcaggtgatctgcccaccttggcctcccaaagtgctgggattacaggtgtgagccaccgtgcccagtcgagattttaatttttataatgggtataggatgaggcctgggtgtctcattctgtgttttaaatgttcctgggaaattctaatgtgcagtcaagtttgagaaccactgggttggaacacataacctccttcccatctcagaccctgaaacatcctgaaaactcctgtatctggagtttttcccccatttttgcttggctaactttgactcttccctcagaaaccagcttcagaatcttttctttagcaaagacttccctgcaagttctttaacagcacttatctcagctgtgacaaaatcatcaatggtgtaattgtgtctttttaatgtcttttcccctattcttcataatcgtcaaagtaaaggatagctcttctctcagtcagaactattaatagatgctgtaatggaaatgaaacaagactctcagactcttgttaaagtaagaagtctagcagagtctcaggctttaattttttttttccgatcataaatgtgggagaaagatcatttaacctgctgctaaggtttgaatatttgttcccttgaaaactcatgttgaaccagcctgggcaacatagggagaccctgtctctacaaataatttaaaaattagccaggtgaggtggcacatgcctgtgatcccagctactcaggaggctgaagtgggaggatcacctgagcccagaaagctgaggatgcagtgaaccgtgattgcaccactgcactccagcctgtgcaacacagtgagaccctgtctcaaaaaataaataggtaaataagctgagtgtggtggctcacacctgtaatctcagcactttaggaagccaaggtgggcagatcacatgaggtcaggagtttgagactagctggccaacatgatgaaaccctgtctctactaaaaatacaaaaattacccgggcatggtggcacgtgcctgtaataccagctactcaggaggctgaggcaggagaatcacttgaacctgggaggtggaggttataatgagctgagatcatgccactgctgtccagcctgggtgacatagcaagacattgtctcaaaaaatacataaataaataataaataaacttatggtgaaactgaatccctaatgtggccgtattgataggtcgggcatttaagaggtgattgggtcatgaggactcttttctcatgaatgaactaatccattcatggattaatgattaatggattagtgagttaatggattaatgggttaccctgggagtgagactggtggctttatcagaagaggaagagagacttaagtagcacgctcagctcttttgccctgtgatgccctgtgccacctcggaaccctccagagagtccccaacagcaagaaggtcctcaccagatgcagcccctccaccttggactttccaacctccattaactacaggaaataaattccttttctttataagttatctggtttcaagtgttctgttctaagcaacagaatacagactaagacacagacaccaatgcatagcttctgatttaacagaattgtttttacaagcatttattctgcttggaaattcagatgtcaatcataagattgttaccagggcaacaaaatattaagtaagaccaccaaatggcaccaaggtttctccttcaaaataatgattgcaatactggcaataatttctaatgtctttggactcctacaagattattttgtgcaaattacacttcaaagcacagatttatggaaccacagaatggaacactggctgctgtaataaatatccatagatctccatactacataagactataaaacacatttagagcctttttaatattctcagtttattaacttatcaatccacattccgtttttttgtttgtttgttttgttttgtttttttactttaagttctagggtacatgtgcataatgtacaggtttgatacatgtgccatgttggtttgctccacccatcaagttatcatttacattaggtatttctcctaatgctatccctcccccagccccccaccccactctgtttttttttttgtttttttttttttaagacagggtctcactgtgtcacccaggttggagtgcagtggtgtgatctcgactcactgcaacctctgcctctcgggttcaagtgattctcttgccccagccctcccaagtacaaggaattacagggttgtgccaccacgctgggctaatttttgtacttttagtagagacagtgttttgccatgttggccagggctggtctcgaacttctgggcccaagtgatccgcctgcctcgacctcccaaagttctgggattacaggtgtgaaccaccatgcctcgcctaaactacattcttgaattagttttatggcacagaatatctttttctcctctctcaatgccctctctctctctagctccctctcctcccctacagctgcaaagaagagatcttcttaatccatttcttaaacttcttttgatcaattataaagaattttttttttagatggagtctcactctgtcacccaggatggagtacaatggcacaatctcagctcactgcaacctctgcctcccgggttcaagtgattctcctgcctcagcctcccaagtagctgggactacaggcatgtgccactatgcccagctactttttttttttttttttttgtatttttagtagagacggggtttcaccatgttagccaggatggtcttgatctcctgacctcatgatccgcccacctcagccttccaaagtgctgggactacaggcgtgtgccactacacccggctacttttttttttgtgtgtgtgtgtgtttagtagagatggagtttcaccatgttagccaagatggtctcgatctcctgaccttgtgatccgcccgcctcagcctcccaaagtgctgggattacaggtgtaagccactgtgcccggccaattataaatattttttaaggctaaactctggaattttgctagttagccttaaaagcacaaagcaggcctataaagttcaattttactggtagaaagcaagaaatggatgaataggatgttcgctgacaaccatgcaattgaaacctcctttgcaaaaattacgagagtgagcaaaggatggcagtgaaggagatcggatctggccagcccctaccttgcctttggccctcaaactgcctgtagttattcctgggtttaggctaatctgacttgtctctttgggagacatttattttattttcttttatatttccttgagacggagtctcgctctgtagcccgggctggagtgcagtggtgagatctcggttcaccgcaacctctgcatcctagttcaagggattctcctgcctcagcctccagagtagctggaattacaggtgcctgccaccatgcccgactaatttttgtatttttagtagagacggggtttcaccatgttggccaggctggtctgaaactcctgacctcaagtgatccgcccgccttggcctcccaaagtgctgggattagaggaaagaaggaaaggaaggaaaagaaaggaaaagagaggagaggagaggggaggggaggggaagggagagaaaggaaaggaaagggagagaaagggaagagagaaagaaagaagaaaagagagaaagaaagaaagaaagaaaagaaaaagaaagaaagaaaaagaaagaaagaagaaaaaagaaaagagaaaaggaaggagggagggagggaggcaaggaaggaaggaagcaagaaagagagaaagagaaaagaggctccttataaacaacaaaagacacccttctcaccaagggtttttggaaattccagagtgatggggtgagaagggtgtctttggaaccaaagctgaagaccaagtacatatttcttactatatcacggtatcacgggaggtaaaacggaggtgtccttgaagcagctcctccccagcccccaatcctcttgtgtgcccggaggatcagaagaggtcccgccgagactcagcttagctgtggttcaagcctctgattgcgtggataagtaccaggtttccagagtgccagggcggggctgccccttgcggtggcattaactttccatggctatttaaaatcagcagaggacacacgatcttcagatgggtcctgttttacttccatattttctcctagagagaagaaaaatcattaaacttttttttgtttgttttttgtttttttgttttattcgttgtttttcttttttttgggacggagtctcgctctgtggcccaggctggagtgcaatggcgtgtatcagctcactgcaacctctgcctccagggttcaagtgattctcctgcctcagcctcccgagtagctgggattacagctttgtatttttagtagagtcggggtttcactatattggccagggtggtctccaactcctgacctcaggtgatctgcctgccttggcctcccaaagtgctgggattacaggcgtgaaccaccgcacctggcctactgtattttttttttttttgaatagagaagggagtctcaaactcttggcctcaagccatcctcctgcctcagcttcccaaaatgctgggattacgagtgagccactgcacctatcccaccccctcccaccctcatttttagaagggcacaggctagagaccatatttccatcagtcacttttgcggctagacctggccatgagactaagttctagccaatgggatgcgataggaagatatatgctcaaattctaggtcctgctcttaaaaaataattgtgtgggccgggcgcagtggctcacgcctgtaattccagtactttgggaggctgaggcaggcggatcacgaggtcaggaaatcgagaccatcctggataacacggtgaaaccccgtctctactaaaaatacaaaaaaaattagccgggtgtggtggtggacgcctgtagtcccagctactcgggaggctgaggcaggagaatggcgtgaacccgggaggcggagcttgcagtgagccgagatcgcgccactgcactccagcctgggcgacagagcaagactccaactcggaaaaaaaaaataataataattgtgtgagcccttttctctctgtcctctccactttcttggggctcagaaccagaaattaaagctacatgttgataaaagcaaaaccatcccaccttaacaagtaaatcgttgagattgcccagtgatttactgttaagtgagagagaggtacatttatatctagtttttttccggtggtgaaggagattctttttttctctctctctctcttttttatgagatggagcttggctcttgttgcccaggctggagtgcaatggcacgacctcggctcagtgaaacctccgcctcccgggttcaagtgattctcctgcctcagcctcccgagtagctgggattacaggcatgcaccaccacaccaggctaattttttgtatttagtagagacagggtttcaccatgttaatcaggctgctctcgaactcctgacctcaggtgatccacctgccttggcctcccaaagtgctaggattacaggtgtgcgccactgcacctggccgggagattcttttttacaacagcttaaagtgctctgtaaccaatacactatgcagtgatttggttaatactttgtgagttccatgagtgcagggtttacgtctgctattgctccccactggaccgccggactctagcacaatgccatgcacggtagacattgaatacatgagtgatacgaggatgaatgagactaggggaaatcagtggaagccctaggcctggcgcagtgactcactcctggaatcccagcactttgggaggccaaggaaggaggatggcttgaggccaggcattcaagaccagcctggacaacatggtgagaccccatagctataaaaagtaaacaattagccgggcgcggtggctcacgcctgtaattccagcactttgggaggccgaggcgggtggatcacgaggtcaatagatcgagaccatcctggccaacatggtgaaaccccatctctactaaaaatacaaaagttagctgggcgtggtggtggcacacgcctgtaatcccagctactcgggaggccgaggcaggagaatcgcttgaacccaggaggcggaggttgcagtgagccgagatcgcgtcattgcactacagcctggcaacagagcgagactccatctcaaaaaaaaataataataataatagtaataataaattggccaggcgtggtgatggcagtgttgtcattgctttaagaggcaggaacagggggaaaagacccagcagtctaaccacacagacaagtcccaagttaagcacttctgtgtgacttgggggctgttgataaagatcagaaataacctatgtggatcacccagcaaaatgaccagtatgaaaagatgttcagtggtagaaaatgaaataagcattgtgactacaactcactcaataagcattcattgaacactggtcactggtaaactgctatgaagaaatctcagctgggtgcagtggctcacgcttgtaatcccagcactttaaagggagaccaaggtgggcagatggatcactttaggtcaagcgttcgagaacagcctggccaacatggtgaaaccccatctctactaaaaacacaaaattagccgggcatggtggcaggtgcctgtaatcccagctacttgggaggctgaggcaggagaatcgtttgaacccgggaggtggagattgtagtgagctgagatcacaacactgcactccaacctgggaaacagagcaagactccatctcaaaaagaaaaaaaatctcaagcttattggatagataaatgcacaggtagatagatggatattgaatgaataaatagttcagtggattaaaaactggttaatgaagaaatggatgggtaaatggatggaaatatgaatgaatgcatgatggataaggacaaatgaaatagacaaatgtacaaatgaaagcaaaggaaaaagagatgctcaatagaaatgaataaggatgagaatcaatgctagacatgaatgagtgaatggtgaatgaaggagtgattgaatggatgaatacatggagttaagttgaagtacaaactcggccaagacttctttttctctgctttgggtggaaatacattttaaaaaaaagagggccgggcacggtggctcatgcctgtaatcccagcactttgggaggctgaggcgggcggatcacctgagtttgggagttcgaggccagcctgacctacacagagaaaccctgtttctactcaaaatacaaaattagccaggtgtggtggctcacacctgtaatcccagctactcgggaggctgaggcaggagaatcacttgaacctgggaggcggaggttgtggtgagccgagatggcgccattgcactccagcctgggcaacaagagcgaaagtccacctcaaaaaaaataaaataaaataaaataaaataaaaaaagagggaaaaaggaaaaaaaaagactccctgatgtgccactgacttcctgtacatgtttaggtaaacttaatatcacctctctttccaccattttcccatttataaagtgggaagactggatttgatgacatcacagcctcatccaggtctggtgccttccttataacctgcgtctcttctttattcttttttttttttttttttttttgagacggagttttgctctgtcacccaggctggagtgtgcagtgatgcaatctcggctcactacaacctccgcctcctgggttcaagcaattctcctgcctcagcctcccgagtagctgggattacaggcgcccgccaccatgcccggctaatttttgtatttttagtagagacggggttttaccatgttgtccaggctggtctcgaacttctgacttcgtgatccacctgcctcagcctcccaaagtgctaggatcacaggtgtgagccagcacccccggcttattccttttttaaaattgttattatttcccacagccacatatgccggggaggttgtcccacatatgttctaccaaggcccctctggcactgagatcaaaccccggaagacccgctcagtctctcctcccgtcttttcaacacgttagcgcccccaggtggctaattagacttcaaaattcagttcttgaggcgggcggatcacttgaggtcaggagttcaagaccagtctggtcaacatggtgaaaccccgtctctactaaaaatacaaacattagccggacatggtggtacgcacctgtaatcccagctattcgggaggccgaggcaggtggatcacttgaggtcaggagttcgagaccaccctggccaatttggcaaaactccatctctactaaaaatacaaaaattagctgggcgtgatggcgcacacctgtaatcccagctactcaggagactgaggcacgagaatcacttgaacccgggaggcggatgttgcagtgaaccgagatcacgccactgcactccagcctgggtggagtgagatcttctctcaaaaaaaagaaagaaagaaagaaagaaaaagtcgtgcttgattatgcttgatggcaaaaaggtgagaccttcctttcggcactgagtctggtagaaatcggtgttacagggtagctaacatttattgaacacttactacgggccagttactgctttaaatgttttatgtgtattacccactgactcctacaacaatcctatgaagtgggttttatcagtgcatccattttaccgtcaaggcaagagagagttggggaagggcgctttctgaatgctgctaccgtgtccagagttggttccttcctgtgggtttgtggtctcgctgactttaagaatggagccagggaccttcgtggtgagtgttacagcgcttaaagatggcacggacctaaagagttagcagcagcaagatttattgtgtagagcaagagaacaaagctcccacaacgtggaagcagactctggtggggtgccgcgctcgccagcttttattcccttattgtccccgcccgtgtcctgctgattggtccattttacagagcgctgattggtccatcttacagagtgctgattggtccattttacaatcctcttgtaagacagaaaagttctccaggtccccattcaacccaggaagtccagctggcttcacgtctcactactacctttctgtagctgctactactacagtgagtagacggcagtgctgggattcgaaccctctgtcttctggcttggaagtcttaaccactaatcgcgtcttcctttcagctactccttgggaaaggcctggaaagaagctacagcacagggcacagcggggtctaaggaccgttccgcggagctcagccagcaggactgtggggctgcaggaaaggacagtccagcccagggtcccagcttctccgccactcaggttggaagtctcgggctgcagtgctcctggggctcaggggcggataccagcaggagcgcggttctgactgcgccagtcaaaagtgaccagcgcgcccagggagatgaggaccagcccggccagccccaggcggactaggttcccccgggtgtagtcggaggagccagagtctgcgggcggagccgggagagaggggccatcagctcccggaccccaaagtctgggccctgaactccaggtttccagcccctggggtggacttagggacctgactctacagtctcaaagttgagggggagtcgatggaggcttcaactcctgggtccaggaagaaggggctggggcctggactgctggatcaggaaggaggggctgggggcctggagtcctgggtccaggaaggaggggctgggggcctggagtcctgggtctgagggaggaggtactggggcccgggaatcctgggtctgagggaggaggagctggaggactagactcctggatctgagggaggaggggctgggtcccaggaatcctgggtctgagggaggaggggctgcaggactagacccctgggtctgaaggaggagaggctgggggcctgggctcctgggtctgagggcggaggtcctggggcctgcattcctggggcggaggaggcgggccgggcctcagggccctcaccttcccagctgatgaccagcacctcgctgcgctgcgacagcacgtagggcgcggagggcgtgtgatagtagcagctgtaggtgccgggggcgcgggcgcccagcagcgtgaagtcggcccagggctgcgcggagtggcggtactgcagcggggccgccacgccctcgcggtacagcacgaagctcatgttccgcaggcggcccgcgcagcgcaggctcacgttggcgccaggacccaccaccggcccgggcagcgccaccagcgacggccgcggcagctcctctgcagagacggggtgagagtccggggccgcgtgagcgtcttccgctcgctcgctcgctctgtttctccttctcctctgtctctcgctttctctgtgcctctctctctctttctgcctctctttctctctgcctgtctctctctctgtctgcctctctctctgcctccctctctctctgcctccctctctctgcctccctctctctctgcctccctctctctctgcctccctctctctctgcctccctctctctctgcctccctctctctctgcctccctctctctctgcctgcctctctctctgcctgcctctctctctgcctccctctctctgcctccctctctctctgcctccctctctctctgcctccctctctctctgcctccctctctctctgcctccctctctctctgcctgcctctctctctgcctccctctctctctgcctccctctctctctgcctccctctctctctgcctccctttctccttctgcctctttctctctctctccccccgcactgtacctctctctctctctgctcccctgtctctctctctccccctagtgtctctgtatctgtcttttcttgtgtctgtgaatctgtttgcccgcctcgctctgtctctctttccctatatctctctgtccctcccccaactcccttgttccacccacttctcctccccgaccccaggacctcacctgtcaccagcagctccaggacatcgctgggctgggaccagacacccggcccccagtctggccttcggtagcagcagcggtaacttcccccttgggctggagtcacctcctccagaaagaattctgccagctcggaggacacatcccggaagagaaggggagcgatctctccaggcttgaaaagtccaaatctccaagcgggttggggtgcccggcatctcaaggtcacgttgaccccaggggtcacaactgtagccggctgagctcccagccatggcttagggtggtatgaagctggggggactgaataaacggggctgcctgggtcctcgggcctcctgggagccccagaagatgaaagggaagttggggaaggaggaaaatcaccttggacaattactgcccctttcttagcctcagtttcctgtttgtaaaatcagggagagactggactacaatcaagccttgttaaaaccaggtgcaaatcagaggggcaggacagaaacttctgagctttactccacagtttgtaaacacagtttcaaaaggtcaggtcccagaactctgtaattttattattattattatttttaagtaatgagatgggagggggcggtctccctatgttgagcaggttggtcttaaactactggcctcaagcaatcctcccacctcggcctcccaaagtgctaagtttacaagcttgtgccaccacacccagacttttttttttttttttttttttttttttgaggcagggtcttgctctgttgctcaggcaggagtgcagtggcatgttctcaactcactgcagcctcaatctcttgggctcaaacagtcctccacctcagcctcctgagtacctgggaccacaggcacatgccactacaccaggctaatttttttttttttaatttttagtagagacgagcattcgctatattgcccaggctactcttgaactcttgggctcaagcaatcctcccacctcggcctcccaaagtgctgggattacaggtgtgagccaccacgcccagccagaactctaattttaaatagctttccagaatatttgcaatatagtatttcaagagttgccaaaacttgctatttggaaaagaaaaatgttggatccctacctcataccatttcccaaaacaacttccagattaattaaagaccctgtgtttctttttttttaaactataaaagtattcaaaaaactataggaaaatatatttgtcttggggtaaggaaggcttcttaaaatataaaataaaaagttgtatggaagattaattaatttgaccacttcaaatttcttaagttgtgtatgctaaaagacaaaactagaggacaaatgatagtactggcagatatcacttattcacaaatcacacaaattaagagtacaggaaggctgttgggtccggtggctcacagctgtaatcccagcactttgggaggccaaggtgggtgcatcacctgaggtcaggagttcaagaccagcctgaccaacatggtaaaatcccatctctactaaaaacagaaaaattagccaggcgtggtagtgctagcttgtagttccagctgtttgggatgctgagtaggagaattacttgaaccctagagtcggaggctgcagttagctgagatcatgccactgcactccagcctgggcaacagagtgagaactccatggtggcatgcactttgggaggctgaggctggaggattgtctgagcccaggaattcaaagctgcagtgagctatgatagagccaccgtactccagcccgggtgacacaatgagaccccatctctaaaaatgaataaaaataagggtcgggtgagggggctcatgtttgtaatcccaacactttgggaggctgaggcagagggatcacctgaggtcaggagttccagaccagcctgaccaacatggggaaaccctgtctctactaaaaatacaaaaattatccgggcattgtggtgtgtgcctgtagtcccagctactcaggaggctgaggcaggagaatcccttgaacccaggaggtggttgcagtgagccgagattgcaccactgcactccggcctgggcgacagagagaaactggtctcaaaataaataaataaataaataaaataaataggtagagatagctatagcgacactgaaatatctccaaaagagttttttttgtttgtttgtttgtttttgaagtggagtcttgcactgtcacccaggctggagtgcagtggcgcgatctcagcttactgcaacctctgcctcctgggttcaagcgattctcttgcctcagcctcctgagtagctgggattacaggtgcgtcccaccacacccggctaattttttttttttttttttttttttagtagagacggggtttcaccacattagccaggatgatctcgatctgaccttgtgatccgcccgcctctgcctcccaaagtgctgggattacagacgttggccattgcgcccagcccaagatcctatttcttaagccctgtactgtgccaggctcagggttttgcacatgtgatttgatgagatctcacagcggcccattttacagagaaggaaatggagtcttagcaagctgtgacttgttctaggtcatatggtcacatataaatgaatacgatggtgaaactgaggtcctagcttaggcctctgcctcagaagttcctggtcttcagtactcacctataatggccactaaggggaatgagaaaagaaggaaggaatggagggagggaggaaaataaggatatctgggatgggattgggcaccaaaataaaatctgagtaattggaaaaggggtgtcagcaacaaaaggagagtggatggggtggctactcaccagacggagtgatgtctgtgtgacacagaggccctgtaggaggttgagggactagtttctttttcctttttttttttttgtctgaggcagagtctcactctgtcgcccaggctggagtgtagtggtgtgatctcagctcactgcaacctctgcctcccaggttcaagtgattctcctgcctcagcctccgtagtagctgggactacaagtgcccgccaccacaccaggctaatctttgtatttttagtagagaggggtttcgccatgttggtcaggctggtcttgaactcctgtcctcaggtgatccacccgcctcggcctcccaaagtgctgggcctcggctcccacaggcatgagccgctgcgcccaacagcgagttcttttcaaaaccctttgtggccagccccatctcattggtaacccaggaatctgagttcccagctcctatctcctctgggaaatgagaatcttatccctccctcctcctgtctcagtaggcagaaatttggacatccattgcccacctaccgaagaagtctgaacgcagacccctctggcctgggcaaccaagagttcaggcccttgaactccacctttccagggaacaatgatcgtagagtttctcctctcacgagttcaggaatctgggtccccatttccctcttctctcaggagctaagagccctgttcccagcccccttttcccagggaatcaggagtcctggcttccatccccctcccatataagaatctgggagtcctccctgtctcctgacctcttcctgcctcaagaaccagagatacctgtccccacctccttcctctttcgggaatctgtgttctcttgctttaggacccaggggtctgggccccagccctgttctttatttgaacctagaatcccaaacctgctgcctggtccccctgcagggtgtctgggtctccattgcctctctctctgcccccaaccccagccaggaacccagggagaagaaaggggtgactcacagagggtcagcagctggaggatcagcaccagggccatggtgggcagatacccgctagagctggagccagggcttggtcgcaccctctcccctcccaggaaatgaggcaacatcagaaaaccagacccagatcctcatttacggaagagagtatcgaggtgggggcctgtgggtgactgtgtcatagccctatggcactgtggaaaaattagcagggggttcagtcataacctgtggtgttcatttatttaactctagaaacaaatactagtcaggaggtggaggcaggaggatcgcttgagcccaagagttcaagagcagcctgggcaacagagcgagaccctgtctaaaaaataaataaataaattgtgccactgcactccagcctgggtgatagagtgagaccatgtctttaaatatagatagacagatagaaagatatctgtctgttttaaaaataagaacctattatgtgccagactcttgctgtcattgattgacagatagataaaaatttgcacctattatgtgccaggcccttgctgtgattgaaagatagatagatggatggatggatagatagatagatagatagatagatagatagataaaaattagcacctgttaagtgccaggcccttgctgtgattgattgatggatagataaaaattaacaccaattatgtgccaggcccttgctgtgattaattgatcgattgatagattggttgacagagaaaaattagcacctattatgtgccaggctcttggtgtgatactgtgttagatagatagatagataaaaattagcccctctaggccgggcgcggttgttcacgcctgtaatcccagcactttgggaggccaaggcgggtggatcacctgaggtcgggaagttcgagaccagcctgaccaacatggagaaacccccgtctctcctaaaaaagaaaaattagccggctgtggaggcgcgcgcctgtaatcccagctattcaggaggctgaggcaggagaatcgcttgaactcgggagtcggaggttgctgtgagccgagatcgcgccattgcactccagcctgggcgacagagctagactcaatctcagaagaaaaaaaaaaaaattagaacctattacgtgccagaccctcgctgtgccatgttggcaggcacagagggaactcagactccgttactgctctcaagcagcagctaccagtccgactgaaagaccaagaccaggtcagtttctttttttttgagacggagtctcgctctgtcgcccaggctggagtgcagtggtgtgatctcggctcactgcaagctccgcctcccgggttcacgccattctcctgccttagcctccccagtagctgggactacgggcgcccaccaccacgcccggctaatttgtgttgtatttttaagtagagacagggtttcaccatgttagccaggatggtctagatctcctgacctcgtgatccgcccgcctcggcctcccaaagtgctgggattacaggcgtgagccaccgcgcctggcccagaccaggtcagtttcttaagtgatctgagctataatggcggtaacagagcactgtgagagcccgcagaaagctcctaacccatctgggatgagacctagcgcttccaggacgagccgatgttgagctgagacctcgaaggacaggttagtcattcaccttctcccgggctcagtttcttcgtctgtaaaatgggctttcatacataaactataaaatggggactattttgttccgccttaggtgggtcgcagcaggaggactagtcactccggagcgacttctaggctgagactaaggagattccacgcaggtccgcaaagtcaggcttgcgcttgctcctgacaccacttcctttacctccacggctccatctttgttctgcgcgagtgcgcacgcgcaggctccgaaagcgggccgtcgcacagagggaccacaactcccagagtgctccgcgtccttgctttcgcctctacttgtgctccagggcgcacgcgcagccctgggagcgggttctcgcgcatagggaccacaactcccagggtgctccgcgtcctcgccgctgtcgccgccgcggagacaaagatggctgcgagtaagtgcaggtgccggtggcgcacggggctcgggtagttctgggaacctctgggcggtcctgggactgaggtgcggcagggcaggggtggaagcgatggggtccgtgctggaggggaacgcagaagtcacgagggggctcctccagggcaggggtggcacgagagggttagaggtcaccgggggcagctacttgcaggggtgacgcttcttgccaccccttcaggagtcggcgccttcctcaagaatgcctgggacaaggagccagtgctggtcgtgtccttcgtcgtcgggggcctcggtgcgtgagtgctccaggcgcaaacttgcatcgtccacccccgtccccctacatccctccatcttgtacccctaaagccctatcgccgccctcgggtcccctctagtgtgtctgcacccccacggcatccccttatctatccccatacccattataacctctccaccatcgccccccgcgttcctctccacctacccaatacgctcttaacccctctaaatgagacgttctcaaccctgcttatgccttaacacctgagcaccaaaaaaaagtccagatcctcctcctccttttcatctttcctctcccccattctgaattgagttggcttgggtggaggtgggactggggaatctgtgtcttgtgaaaatccccgtatgatcccaatgtgccttgctgattgaaaatctctgccctctgccctggaactgccctactcacactttaattagcaccggagttcctgcagggatgggggcgggggattgttaaaatgtagcttttttttttgcgatggagtctcactctcacccaggctgaagtgcagtggcgcgatcccggctcactgcaacctcggcctcctgggttcaagggattctcctgcctcagcctcccgagtagctgggattacaggcgcccagctaattttttgtttttgtttttgagactgagtctcgctctgtcgcccaggctggagtgcagtggcgcgatctcggttcagtgcaagccccgccttccgggttcacgccattctcctgcctcagcctcccgagtagctgggactacaggcgcccgcccccatgcccggctaattttttgtatgttcaatagagacggggtttcaccgtgttagccaggatggtctcgatctcctaacctcgtgatcctcccaactcggtctcccaaagtgctgggattacaggcgtgagccaccgcgcccggccagcttttttttttttttttttttgagatggcgtctcgctctgtcttccaggctacagtgcaatggtttgatcatggctcactgcaacctccgcctctagggttcaagtgattctcctgcctccgcctcccaagtagctgggattacaggcgagcaccaccacgcccggctaatttttgtatttttagtagagacaaggtttcaccatgttggccaggctggtcttgaactcctgaccgcaagtgatctgccttcccaaagtgctgggattacaggggtgagccactgcgcccggccaaactgtaggttctgattctgtaggtctggggtggggcatgggattctgcatttttgaagagttcccaggtcttgtcagtactgctggtccaccagccaggcactaggttaaggttctgaacacttattcagtatggcagccaccagccacaactggccactgagcatttgaagtggtgctggtatgaattgaggtggtataagacactggatttcaaaaacttagtataacagagtgtgtaaactaccaataatcttttgttgattacatggcgaagtgatgttttggatgtactatggttttttttgtttgtttgtttttgtttttttgagacggagtttcgcttttgtccaggctagagtgcaatggcctgatctcggctcactgcaacctccgcctcccgggttcaagcgattctcctgtctcagcctccttagtagctgggattacaggcgcatgccactacacctggctgtttttgtattttcagtagagacggggtttcatcatattggtcaggctggtctcgaactcctgacctcaggtgatccacccgtctcagcctcctaaagtcctgggattataggcatgagccacctcgcccatccaagtatgtttcttaaaatttgtttcatctgtatctcttatttttactgtagctactagaagatataaaattatatacctggctcttaccatctgtcagacagcactggcctagaacattccttttatgaactgtaccccatcccccaggactcctggctcccaccctaaatggactgtggtcagtgactgttgtttgtgcaaccctttctcctccagtttgtaaggctttttttttttttttttttttggtgatggagtctctctctgttgcccaggctggagtgcaatggcacaatctgggctcactgcaacctctgcctcccaggctcaagggattcttctgcctcagcctcctgagtagctgggattacaggctcctgccaccacgcccggctaattttcgtatctttagtagagatggggtttcatcatgttgtccaggctggtcgcgaactcctgacctcaggtgatccgcccacattggccgcccaaagtgctgggattacaggcttgagccactgtgcccggccaaatttgtaacagtcttgatttctccagaacagtcccatgacactacccccaggatgctccatgatgaccctacactcaaacgtgctcattccatgaccaaccccactgctgcctcctccaggccccacgtatctgtgagtgttaggctccaacccctacctccacttaaccccccaaaaaagagttttaaaccctcctgtctataagtagggatcccaaggtaccaaggatcctcctggacgtgctggccctccctgctgccctccccctgcgcactttatcttccctttgccaaggctcaccttctcttcccctctcttcagagccaccttcccctgggcctcacccctgtgtctctccacagctgtaattctgcccccattgagcccctacttcaagtactccgtcatgatcaacaaggccacgccctacaactacccaggtgagtgggggccaggcagggatccccggaataggcccagcctccctgtgctggcgtaagggcagttatgggcaggtctttcctaagcagttatcagagattctgcagtggtgcccggaccccccgttccattttttaagaattgagatataattcgtatactattctgtgtttgtgcttcgtttttgttttttggggtttttttgagacagagtctcgctctgtcgccaaggctggagtgcagtggcgcgatctcagctcactgcaagctcagcctcccgagtagctgggactacaggtgcccgccaccacgacacgcaaactttttcgtatttttttagtagaggcggggtttcaccgtgttagccaggattgtctcgatctcctgaccttgtgatccactcacctcggcctcccaaagtgctgggattacaggtgtgagccaccgcgcctggcctgtgcttcgagtttctattacctttccagatttctgtctctctctgggttcccatctgtggtggtttcttggtctccatcttctcaggtttctgtcctgtttccccatctcttttgaccctagctctctagtgcgcgggatctctccctcgctatctctctggttttccgtgtctctcagtctctgtatttcccgcctctttctgcatcactgattctctgacccttcccctctcacccctggggtcccccttccctctctgaacataaagcgacagaccagctcttctctccagggccctggagacgtgctggtctcagtggcccacctcctgccccacagtgcccgtccgtgatgatgggaacatgcccgacgtgcccagccacccccaggaccctcagggccccagcctggagtggctgaagaaactgtgagcacctccactgacagaggcggcccctcccacggctcccaataaaaatgtgaaaaccaacccccgaacgtgagcatgtgtgtgatcagaggtgggaacaagtagacggtggccggggtgagtgtggggtcagtttattgggcatgcgtcagtcagaggctgggctggccagggtcgggtagggcagcagtttgtctggaccccgagaaacccaactggaatccagggcctcatctgcttcaaagccaaagtcttcctcaaccttaatctgcaggagataaggaacaaggtgttaacaggcctgggaatctagaaaatcccatcagcttcaccatttttgttttcattttgttttgctttttaaagagacagggtctcactctgttgcccaggctggagtgcagtggtgccatcatagttcactgcagcctctgcctcccaggctcaagtgatcctcccacctcagcttcccaagtagctgggactacaggcacttgccaaccaagcctaacatgttttttctttttggtagagatggggtctcagtatgttgctcaggcaggtctcagactcctggcctcaagtgatcctcccacctaggcctcccaaagtgccgggattacaggcatgagccactgcacctggccagcctcacagttcttgtctgcccaggccagtcaccttcctccttacacctcagaggcaatcccagtgttcctgggtccagatgttcttccagctttcctccccacactgggccttcccttccactccgtcttctctgatccttccttctcctctactcccagccttctctagctatttttccttctccaggtcttcctctttccctttccaactttgcctcctttttacccaagcctttaccccactttttccaactacttccctgcctgatcctaggcctccaacatgtcctggttcacctcccttctccaactttccccagccctgggcccctcggggtgcagaaccaaaacccaagagccctgaacctaactcagccccagccctggcccctccccttgagtcccccctccttacctgcactggcgccggctctggagccccagtccctccccttgagttcccgccttcctcacctgcaccggggccagctctggagtcagcgcatttcctgctcggcgtccatcccgtggcactcgccgcctcttccgcccactgggcccctcaccgggggctgggctgccgggttctgggggtgcaggagtccttctgggcggggacagtgtctctttctctggaggctcattctccgcattgcctggggtgggggcatccgtgccctggctgccctcatcctggcaggcaggagggggaggtaggtgatgggtgggtcctgagctcccagttcctgaccctcctggaggcccaacactcacctccagcacaatggtgaactggctggcccggtagtcatccccgtaggagtccagcactctcatgaggaacctgctcagggggagaagccaccaacggaataacttatctcctagcggctggggaaaagggccacaggatagagctcagctcccactccactcaacgccaaagctgtcctggagccagacggtcctgagctctggcactggaggcctgggagccatgcccttgaccagccttgagacctcgagcaagacaaggcaaccattctgaggctgagtttcctgctctgcaaacgacatgacaccctcggctggatgttgcagcggtgacactgaagtagtgacaccagacgatttctgtacttaatgtgatgtcagcacttagtaaacattcatatgtgagttataatttttattgataactgaagagaggggagtacagaacgctcctcctaatgacctcacctcttataaacacccccttctcttttttccccagcccctgcctccagagttccttaaggttcaattgatggaatgcctcctctgcaccagcacctgggcaggtttgttgttgttgttttgcgacggaatctcactctgtcacccaggctggagtgcagtggcgtgaatttggctcaccacaacctccacctccctggtaccagcgattctcctgcctcagcctcccgagtagctgggactacaggcgcctgccactacacccggctaatttttttgtatttttagtagagacggagtttcaccgtgttagccaggatggtcccgatctcctgacctcgtgatccgcctgcctcggcctcccaaagtgctgggattacaggcatgatgagccactgcgcccggcctatttcaacttaagtgaaaatctcacctgtggccagcggctaccgtgctggacagcacaggtacggacagaggaaccctgggagccgcaggtttcagctttggggagggaggatgaactagcagaggcagccaagaaggaacagccggaaaggcaggagaccccaggttgctgggtgcccaggatggcaagaatgggctccagggaagagcacatagccctgggccactgtgccgagcctgagccaaggactgagatgagaactgtggttgactcagcaacgtggagccattcctacaaaacttgctccagttttgctggtacagggacactgcgagtggcaggggcagcagccacctgggcaggttctgtggagacacacagtgggaagctctgagctcagctcaccacctgcaagctccgacaaccctgccgcagcctcatgatattggtgctgcccttagttgataggaaacagctcagagaagggacactgcttgcttagagtcacacagcaaaaaaaaaagaaaatacttgcagtcaggtctgtgctcgtgtgccttccatcctgctgttccctcccttcagggggaggatgccctccacccggccctccctcagtcccagtgctcagccctctccacccggccctccctcagtcccagtgctcagccctctcctccaacaccgaatcccactcttcctccttgtttgcctcagcccccggccctcatctccggcttctccttgtggcttgtgagggttgggtggatgtggaagtgggagagacagaggggctgggagcatttgggagctgaggctcacaggcccagaggggacagagaaggggttacctccgttcctgctgcagcctccgagttatcctctgcacctgatggagcctgttcaggacccgctcgttcacctatggggtgggaaacgcccatcagctggatcccacggctcccgttcatttgtttaacggatgtttaatggggcacgcactaaactctggagactggccaaagaccatcccgtggcctgaggtccttccaccttcccatccctccggctcccctctcaccatgccacagtcctgagtgccctccagtgggggccttccgcgtgctgttcctctacctggaccctctccccagtcatccgcacaacttactccccactccaagtcttaggtcaactgttacctgctcagagagcctgaacctcccattaagtcgaaacacaccaggccaggtgcggtggctcacgcctgtaatcccagcactttgggaggccgaggcgagtagatcccctgaggtcaggagttcgagaccagcctggccaacatgatgaaaccccatctctactaaaaatacaaaaaattagctgggcgtggtggcaggtgcctgcaggatagtcgcacgaacctgggaggtggaggggtgaagtgagttgagatcaccccactgcactccagcctgggcaacagagcgaggttctgtttcaaaaaaaaaaattgcaacacacccgaccccccttcccatgccagaaccccacccggccattcactcctggctttatttcctcctagtgctcatctgaggaggcaggacgcagcctctccgcctctttgcttattctgctgactgaccgcctctccagccagagcatgagctgaaaaacgacagcaacttgtttctacatcccgtgccttaaccagagcctggcacgtagtacatcctcgatgaacatttgcagaatcaatgactttgcaaagtgagaagtgcttggtgaataccaaagagtcagacatgctggaggttagggcaggaggtgcgactttagttacgacctgcagagaaggcccgtgggcccagacttgaataaggaggagacaaaggggtgacaggaggaaagtatgccaggctgaggggacagccctgcacgcagcttctgaggactccagcctagacatggagggagagatgtgactcagccaaacagggacccaaagacagtggctgaagcaggtgctgctcctgggtcagaaagacctgagttccgggcggggcacagtggctcacgcctgtaatcccagcactttgggaggccggggcgggcagatcacttgaggtcaggagttcaagaccagcctggccaacatggtgaaaccccgtctctactaaagatacaaaaattggccggatgttgtggcacatgcctgtaatctcagctactcaagagtttgaggtcgggagttgcagaccagcccggccaacatgatgagacctcatctctactaaaaaaaaaaaaaaaaaaagaaaaatacaaaaattagctgggtatggtggcgcatgcctgtaatcccagtttctcaggaggctgaggcaggagaatcgcttgaacccaggagctggaggttgcagtgagccgagatcacaccactgccctccagcctgggtgacagagtaagactctgtctcaaaagaaaaaaaaaaaaaaaaagtgccaggcacggtggctcacgcttgtaatcccagcactttcagaggccaaggcgagcggatcacctgaggtcaggagtttgagaccagcctaacgtggtgaaaccctgtctctactaaaaatacaaaattagccaggtgtagtggcgcatgcctgtaatcccagctactcgggaggctgaggcaggagaatcgcttgaacccaggaggcggaggttgcagtgagctgagattgcagcattgcactccagcctggacaacaagagcgaaaatccatctaaaaaaaaagagttcaagttttggctctggcttggcacagtggctcatgcctataatcccagcactttgagaggccaggagttcgacaccagcctgggcaacagagtgagaccccaacactcaaaaactaaccaaaaaaattagctgggcttggtggctgtagtcccagctccttcggaggctgagattgctagagtccaggatgttggggctgcagtgagccacagtcatgccactgcactccagcctgggcaacagagaaagaccctgtctcaaaaaaaaaaaaaaaatctcagatctgccactgctgagctctgagcttgggtgcattacttaacctctctgagccttgattttctatacttgtaaaatagtagtaatctattcctgggggtggattaatggcagaggctccagttgagtccgtttgggccttggtgtctgtctgttaaacagggtttggaatatgcccctggcctctagccttcctccttacagaactccccaatactgtcattaagaattgaggccagatgtggtggctcatgcctgtaatcctagcattttgggaggtcaaggcgagtggatcacttgaggtcaggagttcaagaccagcctgggcaacatggcaaaaccccatctctacaaaaagtacaaaaattagccaggtgtggtggtgtgtgcctgtagtcccagctattttgggggctgaggcaggaggactgcttgaacctgggagactgaggctgcaatgagctgagattgcgccactgcactccagctttggtgacaaagtgagaacctgtctcaagaaagagaaaaagagttgaaggccaggcgtggtggctcaagcctgtaatcccagcaccttgggaggctgaggtgggcagatcacctgaggtcaggagtttgagaccagcctgaccaacatggtgaaaccctgtctctactaaaaatagaaaaattagctgggtgtggtggcgggcgcctgtaatcccagctactagggaggctgagtcaggagaatcacttgaacccaggaggtggaggttacagtgagctgagatggtgccattgcactccagcctgggagacaagagcgagactccacctcaaaaaaaaaaaaaaaaaaaaaaaaaaaagttgaattatttcccccaaaagagggtgttgaggctttaacccccagtacctcaggatcaccttatatggagacagtgtcgttacaaaagtaatcaagttcaaatgaagccagtgggtgggccctaatccagtatgactggagtccttataaaaagggtaaattgggacacagacacacacacagggagcagcaatgtgaagatgaaggcggagatcagggtgatgtttgtacgtgccaatgactgccagaaacctccagaagccaggggagaggcctggaagattctcacaaccctgtcgacaccttgccttggatgtctagcctccagaactgtcagacaggaatttctgtgcttgagggaccctatttgtgataagttctgggagtccaagcagactaatacaactgtcttcagagtttcaggcatccagacctgatgctgttcctcccccatttgaaacccttcagtggctccttcactctcaaggaaaaaaaaatatccagacttcttgtcctggtgttcctggcctgccaagatctgagccctgcctgctgtttaatcctcattgattgattgattgattttgagacggagtctcactctgtcacccaggctggagtacagcagcatgatcttggctcactgcaacctccgccttccgggttcaagcaattctcatgcctcagcctccctagtagctgcgactacaggtgcgcaccaccacacctggctaatttttttgtattttagtagagatggggtttcaccatgttggccaggctggtctcgaactcctaacctcaggtgatccgcctgcctcagcctcccagtgctaggattacaagcgtgagccaccatgcccagcccatccttattctcagcaaggaggctattgcagtcattcagcccagacagctggagtttgcaatggcagccatagggatggaggagaggagaagggtccagagacactcaagaggcggaatgaatgagtcgagaggagtgaatcctggcaggggtatgggagatgtgaagagcttgggctttcacctgtgagcggtgccacgcattgagaggcccccgggagacatcagagaacccatctgcgttgtcagggaagctccacgggagatggcccttccaggggcccggcacagggccagacacataatgcatgctaaatgactgaatatataagctaaatgactgaatatatcagcaagccaagaaaggctgggcatgtggaaaggcagagattgcggggggcggtagtttaggccaggggaccccaaaaccgggggatccgcactcacctacctgctcgatctcccggcagcgccgacctagtgcctggtactttctgcgatttaattcccgctggcgccgccgccgaccccgggctgcctcttcctcttcatctcgctcccggagccctgagccgcccagaccacctgacacaaactccacttccgtctccagctcgctctccaggatgtggccaccaaataggggaggcaacgccaactctgagcctggcggcgctgagaactcctcaaagcccacggctgccatggtcctgagaggcagggaaaggctcaggggccctggatcctggacccccagccccttctcccactgaaccaggagcccagaccccaacccctcctccctgagatcctagaatccaggcccccagcccctcctccctcagaccgtagaatccagctcccagccctcctccctcagacccagaagtccaagtccgcaacccacccttcgcagcacccacagggttcaagccctgaccccctcctcccaggatgcaagagtccagacctccagactttttctctccaaggacccagggagtccaagccccaaccctcaaccagacgcaagagtcctggcttccaacctcctagtctgtcagatccagcagtccaaacccctaaccttctcctccctcaggatgaccccagtccataaaagggttctaaggtaaagcagttgcatgaactacaacccccatcagacctcagcgtaaaagctcatatggttgcacacaatgcagctgcactgttttctgggattcgcactttttcacaagggctcagccacatacccttctctctgctccaattccatctccgcgacctccggaagccccgggcctcagagcttccgacctcttcaatctgtaggttaagccgttcgcaaaactacttgtcccatcaggctcagcagccgaggacggcgggacgtggccctaggccttgtgggagttgtagtttcctgtttccggcttcgcttcggcccacccccacgtccaccccgaatccctgcttaaaggccttgctttcttgtctaacgccgcaaccagtcctctgagttgccaacgtctttcttcttgtctcgacgccccgtcgtccggccacagcgattctctgcttagcaggatcggtccacagcgggacgtgagtccctttcctcctcgcggcttaccgcctctctccgcctagtgccaggtgctaataaagttgttgtttcaaatgcggccaggaacatcgcgagcggggaccaatcagagagtagctttgcctctataacggcgcgagagtgagacgtcatcggtgagcgactaacgctagaaacagtggtgcgcggagaggagaggtgagtgtgatggggaccacggggagcgggaggctgggctcctgggtctgggagaagaagtgtgtgaggaaaaaggcgggtctttacagcttggtttttgtttttttgttgtttgtttgttttgagacggagtctcgttctgttgcccaggttggagagcagtggcgcgatctcggctcattgcaacctccgtctcccgggttcaaacgattcttctgcctcagcctccagagtagctgggattacaggcgcccgccaccacccctgactaatttttgtatttttagtagagacggggtttccccatgttggtcaggctggtctcgaactcctgatctcgtgatccgcccgcctcggcctcccaaagtgctgtgattacaggcatgatccaccgcgcctggccagttgtttgtttgttttgtctgagacggagtttcgctcttgttgcccaggctggagtgcagtggcgcgatctcggttcactgcaacctccgcctcccggattcaagcgattctcctgcctcagcctcccgagtagctgggattacaggcgcgcaccaccacgcccggctagttttttgtatttttagtagagacggggtttcactatgttggccaggctggtctccaactcctgacctcagatgatccacccgcctgggcctcccaaagtgctgggattacaggcatgagccaccgctcccggccttttacagcctgtttacccaaaagtcttaatatgcgcctaccatggtgtggccctggggatgtggaaggagcaaaaattgttcgctaccctcttagagctttggttgatgcctggcagacaggctttatcaaataattacttcattaatcacaaatgtgtgaagtgccttactgtagacacgcagagcgtgcgggacacgttatcacaaagcaacctcctgtagtctagagtggggcgtgtgggtcagggaggtggaacgtgagagctgaaggctgaggagatgctgggctactaagaagtgaggagagccagacgccatggctcactcctgtaatcccagcactttgggtggcccaggcgaaaggatcgcttgagcccaggagtttgagaccagcctgagcaacacagtgagaccctgtctctacagaaaaatttaaaaattagccgggcgtgctggtgcgtgcctgtcatctcagctatcgggaggctgaggcgggagaatcgcttgagcccaggtgatcgaggctgccgtgagctatgatggcgccactgcactgcagcctaggtgacagagcaagacatggtctcaaaaaaaagaaaagaaaagaaaaaacaaagtgaaggaaagggccactttagttacaagggactcctgtacaaagacctggaggcgggaagagaccgataatgtaaccaactcaagtttctgctactcagaggcagaggaagtggggggtggtgaaagtaaagcagctttactgatcaaatgctcgcagatgagaaatggccaagctaatgtctttagaagaccatttcaagctttaggctggggagaggggcttaaaaaggggaactttgaatgggaggcatacaggagtggtgctgggtacaaggtatgtgtgtcttgctccgaaggctgtcttgagtcacgggccacctggagcatgggctggtgtcaagtcaacaatggccacgttgtagattgatcgccttgaggtgatctctggagttttgcagctgggtttccatacctagtttgtttcaagattagcccctgcggcgaggcgcggtggcttacgcctgtaatcccaacagtttgggaggccaaggtgggtcgctcacttgaggtcaagagttcaagaccagcctggcttacatagtgaaaccttgactctacaaaaaaaaaaaaaaaaaattagctgggcatggtggcaggtgcctgtagtcccagctactcaggaggctgaggcaggagaatcgcttgaacccaggaggtggaggttgcaagtgagccaagactgcgccactgcactccaacctgggtgtcagagccagactccatctttaaaaaataaataaataaagattagcccctggaacttctaagtaagcacatagataagccagcagtgcaagacagtatctagtgggaaaggagggaaacaaagaatttcaaagtatgttttcaaggctaaaggcaagaaaggaataagaaagtttgcaaatgcatttggaatctacaccacttggttccagtaagtcttagcaaggtggcggtcataggggtgtgctgcgtcttgcacaggtcggagctggagactcgccagtgaacaaaacaaactaaagcacctgttgtcgtggagcctgcatgctagtggggttgataaagaaggaccagggtcttctgggggagaatcatcgctcagtaataaggagggactttgtcggggcaagtttttagggaacgctgctgtccctccccaggcctcgggatgtctctggcagatgagctcttagctgatctcgaagaggcagcagaagaggaggaaggaggaagctatggggaggaagaagaggagccagcgatcgaggatgtgcaggaggagacacagctggatctttccggggattcagtcaagaccatcgccaagctatgggatagtaagatggtaagaggacaagaggtgttcctagcagggggctctagacagaatctcccagaagggggtgatacaggcttctttttgaagagtgctggattctgactgtcttctcctttcctacagtttgctgagattatgatgaagattgaggagtatatcagcaagcaagccaaagcttcagaaggtgcttcctcccactctgtgcccctccccatctcctgtctctcctgccaggccccctggctccctggctgcttgtggctgggtatatctccttctcagccttttccagagccttcttttttttttgtttcaccccaacccgttcccttttccactaaatatatattgcattgtaaagctcatgcttcttaagtccttcctgtgtgctgagcttactgatcatgataggactcagcttgaggtttcccagacttcactgattcacatgaccggttacagggtttttgccacatctataagccgcttatcctattatttgcttaacatattctttgagtctaggactttttttcttaaatttatctgagaaggaagcaaattgctaccatgaatggaaaactggtatcatttggcaaagacaaagtcactgtataaaaatagatatataattatttaggaaccacctaaggccgggcgccgtggctcacgcctgtaatcccagcactttgggaggcggaggcaggtggatcatgagttcaggagatcgagaccatcctggctaacacggtgacaccccgtctctactaaaaatacaaaaaattagccaggcgtggtggcgggtgcctgtagtcccagctactcaggaggctgaggcgggagaatggcgtgaacctgggaggcggagcttgcagtgagccgagatcgtgccactgcactccagcctgggcgacagagcaagactccgtctcaaaaaaaaaaaaaataacctaaaaccttttctcatgcccaaattgagagaacactagcttatctcatgagtgctcagactcactcttaagagggcagtcctgttaccattcctattcttttttttttttccttgagatagagtctccctctgtcgcccaggctggagtgcagtgatgtgttcttggctcattgcaacctccacctcccgggttcaagcgattctcctccctcagccttatgtatagctgggattacaggtatgcaacaccatgcctggctattttgtattttttagtagagatggggtttcaccatgttgaccaggctagtctcgaactcctgacctcaagtaatccgcccacctcggcctcccaaagtgctgggattacaggcatgagccactacgcccagccttcccattcttcttgaatggaatttgttgatgacaggaagccataggaggtttctggggaaagaagtgtagtgagagggcagagtttcgggagactcactgcttgctttctttaacgtttacctgggcacccagttgaatcgcccaggtctttgctctcaaagtactcaaggtctagtggaagaggcaggccaggttccagacagctatcagtggtggtaccaagctggggacaccggagccacaggagggactggctgaccctgccccaggtgtcaggaagaatcgatagctgaattggactgtagagcatgaatgcatgtgccaggcaaagaaagggagaagggggcccagggaaagacagcggcaggcccggggcctcagatatccggagagagaatcctgcagagttccagatgccaggccaaggaatttctccctccagagggttatgggacacagaaagtgacatttcctgatgtcaggccaggctcagggatggagtcagaccccgtcacacccggtgtctggttgaggaggcagaggtgaaacatctcacaagctgtggcagtccctgtttactggaggtgcacaagtgctgcgggtacacagaggaggcgtctgatccttccagaaagggagggaaggattctgagtcgctgcctgagtcttaaggacttaaagagccatttgagcatcagggttaggagtgcagactctgacgccgccctgcctggtgtcagatctgagctctgccttctactggctgtgacatcaggcagttagtatttgcatgacttttaaacacaacatctttttgtttgtttgttttttgagacagggtctcactctgtcacccaggccagaatgcagtggcacgatcccagctcactgcagccttgaccttgtgggctcaggcgttcctgcctcagcctcccaggcagctgggaccacaggtgtacaccaccatgcctggctaattttttttctttaattatgtgtagagatggggtctccctatgtcgcccaggttgctctccaactcctgggctcaagcagttctcctgcctcagcctcccaaagtgctgggattacaggtatgagccactgtgcctgacctcttattactaaagcacaaagaagcgttttccagaaacagacgtggggtaagggatgctctggggagagggagcagcacatgcagaggccaggaggggtctggcgcggtggctcacgcctgtcatcccagcactttgggtggtcaaggcagatggatcacctgaggtcgggagttcgagaccagcctgcccaacatggtgaaaccccgtctctactaaaaatacaaacaaacaaaaaaaattagccgggcatggtggcacatgcctgtaatcccagctactcaggaggctgaggcaggagaatcgcttgaacccaggaggcggaggttgcagtgagctgagatcatgccactatactctagcctgggcaaccagagcgaaattatgtctcaaaaaaaaaaaaaaaaggctaggaggagtgggtgtctggggcactgtgatcactcctttatggctggagtggaataaaatgaggtgtggtgagaggatggggcgggaagggcgggaggccagactgcagagctgctgagtcagcaaacaggaacgggggaactccctgtgtgccaggtgctgtcctgggtactcggctgtgggtacagccaacgcaggcacagcactggtccctgcagagcttccggagttggggaggccctgaatgtcagtctgaggactcggtcattagccttggggctgtggggagccgtaggaggtttcacacggtcagttctggggtagatggggtcaagtctagactggtgtggagggagagggattgaaggcaggaacacaagttcagggatgtctgcagacatcagcctgtccctggtttactcttcagcccctccttcctgacccctcccaacttcatcctccgcctcctccagctgcgggacccgagagggggtagggatttagatactcacacccatgcctccgtgtcctcacagtgatgggaccagtggaggccgcgcctgaataccgcgtcatcgtggatgccaacaacctgaccgtggagatcgaaaacgagctgagtgagtgctggggggcaggcggagacagccccgtgtgacgtccctcacgccccctctcccttccccactggcctttcccagggtcctgcccctaagcccaagctcagatcgaggttgacctgctgtcacagagtggctgaaataagaaggaagtgcgttctctcgcgtatgagtctgaggagcactcggggatggtgtggccgcttggctgcctgtagggccccggctctttccatcctgttggtcggccacctgcctcacggtgcgaggtgactgccccacctccagccatcacctccgcattcccaccagcaaggcgcttcttttctttaagaacatgtcactgcagctcacgttttacagaccagaactaattcccctggtcacacctagcggtaaggacggctgagaaaggctgtatgctggtgcccgtgtgccaggccacaagccagggcttcagttactaaaggaagaaggggacatgggtgttagggccaaccagcagagtctaccttccatctcacccgacaacctcctgtcccgtttaccctagacatcatccataagttcatccgggataagtactcaaagagattccctgaactggagtccttggtccccaatgcactggattacatccgcacggtcaaggtgagcgcagagaaggtggggtgcttctgctggcgtgaaggggcaggcggggctcactctcggaccccctcccagaggcctgagggtctggagacgatggagaggagtggacgagggctcagtggtctgctctgcccagcgtgggagggacggagcctggacaggactttctcagggctcccctccaaccccagtctcccgagagggcttccccgctggcctgacccacgctgctcccgctgtggttggagccggtggcattggagttgacatccgaaggttgacacagggcaggcacacggagatttgggggagagagacgtctaagtgcagagagctggagagggaacaagtggggaggaagtgaggcggggaaggaggggacggggaagaggtcggatcacgtccagcctttgggtcttaggagaaagccaaggaagggtttcggaaaagaggggcaggtgtgcgtgagggcggggagaggaggaggtccccacgcatgtccaggaaaggattaggatggcggtggggaagcccctgcagggaagcgaggccgcggatttgcactccgacttgacgcaggccagaggcttgtgaggccacagtctttccagacgccactctgcccgggctccgtttccaggtcagcgaaagcagggcagatggtgtggatgcttgacgtggtggaggcaggaatggtgtggatgcttcaggcggtggaggcaggagaggcccccagtgcagagaccctgactgtcccagtgtccctaagaagagacctgaggaggtgctgagcaagagaggttctcgagccttcctgagttcccgagcctcccctatcttctctgctcgcccccaggagctgggcaacagcctggacaagtgcaagaacaatgagaacctgcagcagatcctcaccaatgccaccatcatggtcgtcagcgtcaccgcctccaccacccaggggtatgtccgcttcgagggaggcgccgggccctaatgggattggggattaggctggagctacacacgcaggtgtacacacgcacacacacatacacacatgcacacacacacacagaaccgagagggctggggctgggcacaccaggcaggcgggagacccaggaggctgggcccacccgcccctgcaggcagcagctgtcggaggaggagctggagcggctggaggaggcctgcgacatggcgctggagctgaacgcctccaagcaccgcatctacgagtatgtggagtcccggatgtccttcatcgcacccaacctgtccatcattatcggggcatccacggccgccaagatcatgggtgagtccccgggctgggtcccatggagcgggggtctgctgacactgtgaccttgggaaagctacatccttttctgtagaatgggggctttggcacctggacctcagcaccccgtctccctggacatcacagaggtcagccagcctggcacacagcaaagcctcatctgtgggaaaaacactcacccacagctccttctccctcccctgtgccggaaacccagagatgaccacacccaggccctgttgtcagggagctcctggtttggtgaaaatggttccaaaacacagccatccctggaacggcgttagtgtggcttagcacaaacgtggtggtcagcttcctgttgggggcctcctccctgcacccccaggccagctgccctccctctctgagcctcctttgcatctgccccttgcggaatgggccaggtcgcccgcctggcagggccatcgaggaatccaaccagaacttcatgtaaaggtgcccagcacacgtcgagcccccaggcagatttactcacccccacctctctgctttcttctgaccgcccccccttcctccctccctcccaccgcaggtgtggccggcggcctgaccaacctctccaagatgcccgcctgcaacatcatgctgctcggggcccagcgcaagacgctgtcgggcttctcgtctacctcagtgctgccccacaccggctacatctaccacagtgacatcgtgcagtccctgccaccggtgagcccactgcgtcatggcccctcccccggcccccctggagccttccgctgtgcccagacagcctgagcagccacccaccatctggcccagctgacggtagcactcaggagctgggaacagggtggcatgggacgtgagagccagggctctgcagcagaccagctccagcacccaccagtcaggtgactgtgggcaagaggcatgagcgccctgtgcctcagtctcctcccctatcaaatgggagcacagcgcctgcttcatgagttgggacgagggctcagtgcacatgaagcacttacagttcaggcctagctcacgacaagcagcgtcgggttagcgtgcaactgctccgaagaccaccctcaggtttgaccattcactagaaagactcacagaatccactgagggctgcacatcagccatggggagagacacacaggaggggcaggagaggtcaccaacctcggagcttcccgggtcctctccctgcagtcgggacacatcaccatcccagcatcgacgcctgacagcacacacacaggcccgctagcctggcggggcgcagtggctcgtgcctgtcatcccagcactttgggaggccgaggcgggcagatcacctgaggtcaggtgttcgagaccagcctggccaacatggtgaaaccccatctctaccaaaaatacaaaaaactagctgggtatagtggcacacacttataatcccagctacttgggaggctgaggcaggagaatcgcttgaacccaggaggtggaggttgcagtgagctaagatcataccactgccctccagcctgggtgacagagtgagactctgtctcaaaaaaaaaaaaaaacaagcaagacaggttctgggacagacaggcctgggtccagaccctgctctgtccaactgtggcgagttacctcaggctcacggccctgtgccctgcctggcctcccccagggatggggagaacaatagcactgatggccaaggctgggcaggcacttcctggccccaccccccagccctgtgtggggttttttttgtggtcttttctgcgaccctttaggtcaggcactgctactggaacacacccagggaggctggcaggtcaccccatcctgggaggagagagagtgggcgatagaacccaggacgggtgggcctggggctcggggctccagctgcctcactgcacccctgccatcgccaccgcctcacagccctgggcatatgggttaaacctgccccagggagcctgatgtcttgtcacccaggcctctgcctcttcatttggccatctcacatcggtccaggcacaggccgtagacaccacaggcctgtaagggaggccagggctggccatcgcttcactgtggctgacagctgggctctgtttgcagtttggattggaaccctggctccatcacctgctggctgtctccctggccacatgacttgaagccttggtttccacatctgaaaagggggtgcaatgatcacaccagcccgatatttgaatatttgatgagatgatccgaggggcgtgcttagcatggggctggcatccaggccgagtgcactccccccggcgtctccacagtcaccaccgtcctcgttgtcagcgtgccttactgtcatccttacctgatggccacttatcagctgggacatggctctgtgccctgccctcatcccctcttcctgtgaagtaggagctgagagcacacacctctagagcccaagggtggaaagcccccttccaggaccccaggtagagccagaggaggagcgcgcgcggttgctttgctgttacctctgtctgtctgtctcacacagattccacccccgttttccgttgctccaggatctgcggcggaaagcggcccggctggtggccgccaagtgcacactggcagcccgtgtggacagtttccacgagagcacagaagggaaggtgaggagggaaaggtgaggggcggccgggcgtcttttcctctgggcctggggtgtctctgcagggagaccctcagcagggagcccaccccagcgagcactgtcctaccaaggcggaggcagtgcttctgcccaccctccctggggtcaggcacccccttccccagtggggtttcctaggtctgctgttggaaggtagcatgaacctactggcttaaaacagtgcaggtgtggccgggtgcagtagctcacgcctgtaatcccagcactttgggaggccagggtgggcgggtcacaaggtcaggagtttgagaccagcctggccaacatggtgaaaccccatctctaccaaaattagccgggtgtggtggcacgcacctgtaatcccagttactcaggaggctgaggcaggagaattgcttgaacctgggagacggaggttgcagtgaactgagattgcatcattgcactccagcttgggtgacatagcgagactccatctaaaaacaaaaacaaaaaacagtacaggtttattatctgtggtcctgtaggtcagaagtccaaaatgagtttcactgggctgaagtcagggtgtcatcctggagcgttccttctgggggattcaagggataatccattccctggtcttttccagcttctaggggtcactggcaccccttagctcgtggccctccctctgtctgcggagccagccacatagcaccctcagacctctctctgactctgcttctgtcttcatatctccgcctctgtttttgttcccctcttctattttaagggcccctgtggctatactgagcctactcagatggtccaggatagtcttcccagctcacaatccttaaaatccttcttaacctcttcacgtcccttttgccctgtgattctgggaattagaacatgggcctctttgggcatgtgtgtgttggtgggggcgtaatttgccttccacaccaggatctgtccccgctgcaacaggggatgttattcaagtaattattcagttaccttctgtcttccttggtagatgtactcgggagaggagacgttttctgtcttgtgaactgtcgtttgccaagcacccggcctggcacagcgttcaggtgttccgtgtccccttctcctttccctctccccatctcacccctggtctgggtgtgggggtgcagctgtgagtagcacagacaggacccctgccccgtggcgtggacattcttgttggggccgggtcaaagagacagtcaacaggtgaactctgtcctgcgtctagcggtgctaagtcaacaccaagaagaaaaagaaagggggtggcggtgaggcagcattaggtgctgatttaactaaggcacgtggatactcggggggcccgctcagaggaggcctgggtgggcagcccacgcgagcagctgcaggacctccccctcgccctccccaggtgggctacgaactgaaggatgagatcgagcgcaaattcgacaagtggcaggagccgccgcctgtgaagcaggtgaagccgctgcctgcgcccctggatggacagcggaagaagcgaggcggccgcaggtgaggggccctgggggtccggtaggcatgggggtcatggaggggagaagccggcgtcctcctcccagccgactccctggcgccgcccacccacccgtccccaggtaccgcaagatgaaggagcggctggggctgacggagatccggaagcaggccaaccgtatgagcttcggagaggtcagactcccagagcgccctcctcaaccccacagccagccagccgccaccgccctctgcctcctgccaccgcccctcctctcgtcctgtggccctggctcatgtctagggcgctgccccagcctccccccccccggcctctattctcgtttccatccgttcagccccaaagcgaccctcgcgacccttggagcctgtgtctccgctgcttagagcccccgcggcttcccatcgccccgggctccttggccggttcctccctgcccagaggctccttagtgccctgctgcacggccgccccgtccctgggccccgccagtctcctctgttatcccagcgtcatccccttggtcctgcaggaccgaactcagaggccacctcatcctattaaacctgttctggttcctgacatcccccgacccacacgagtaaggaaggaatggcctcccaactctgagctcacagagcagtgctgggaccgggcccctctcaggctccccagcatcccccgcgtgtgtgggcccccaggcctcagccgggccgagtgggtaccggagcaggtgcccgtgggaccggccggctggtgaccgctgggcttcgggctggtggagggggtgcctcggtggctggagggcagggcctggtcgctgaactgcagggcgcctcctctcccccctagatcgaggaggacgcctaccaggaggacctgggattcagcctgggccacctgggcaagtcgggcagtgggcgtgtgcggcagacacaggtaaacgaggccaccaaggccaggatctccaagacgctgcaggtatgggccagacccaggtggggctggggaccgagggacacaaggtggggggagcccagatcgcagcctccctgtcctccccacagcggaccctgcagaagcagagcgtcgtatatggcgggaagtccaccatccgcgaccgctcctcgggcacggcctccagcgtggccttcaccccactccaggtacctcccctgggccggctctgtccccagccctgagaccttggcaaggccccttgccctctgcccctgtgaagaaggccaggatgagtctcctcatggggctgttgtggagggtgtggtgacgaggtatgcagaggacgtagacagctcctggcacacaggaagaggttagcagagacgagagcccagcgctgagcagtcctcgtgagcacgcactgctttagaaccaggcccacagctgtgttcagggcacccagttcctctgtcgggctgtgagcgggtaacactgctcagcctccaggccctccagttcaaaacggccaggacggttaaggtaacctcaggaccccactcgagaaagttcccggctaggcgggcttggatgtcaagtgtgggtccaggccccagccagtcagcagtgagcagcgtggagcatggcagtcaccgcatcgtcggagcctcggtttaccatccacagagcagggcgagcctgcaccacggaggcgagacagcagcgagctcatctgcccagtcagcgggtgtctacgcagcacctgctgagttctgtcagtgttcccggctctggggatgaagcaacgaatgagagacaagtcttaccttcttggagccagtgggtggccgggcgcagacagctcagtaagatgtccagtgtaggagaaggcagaaatgccaggccgggcgcagacagctcagtaagatgtccagtgtaggagaaggcagaaatgccaggccgggcgcagacagctcagtaagatgtccagtgtaggagaaggcagaaatgccaggccgggcgcagacagctcagtaagatgtccagtgtaggagaaggcagaaatgccaggctgggcgcagacagctcagtaagatgtccagtgtaggagaaggcagaaatgccaggccgggcgcagacagctcagtaagatgcccagtgtagtagaaggcagaaatgccaggccgggcgcggtggctcacgcctgtaatcccagcactttgggaggccgaggcaggtggatcatgaggtcaggagatcgagaccatcctggctaacacggtgaaaccccgtctctactaaaaatacaaaaacttagccgggcgtggtggcgggcgcctgtagtcccagctacttgggaggctgaggcaggagaatggcgtgaacccgggaggcggagcttgcagtgagccgagatcgcgccactgcacttcagcctgggcgacagagccagactctgtctcaaaaaaaaaaaaaagaaggcagaaatgccagggaggggaggaggtggaaggtaggaggtgggacaggggaggctctcgtttcggagcagccagggagggcctctttgagaagatgaggccagtggctgtgcctttccaagcctcccctcctccatcatgaggtgctcaggactgaaaagaacgcacaggaagcacttggcactgggctcaccattagagcccaatgactgggtcctgttattatttttagagacgggggctcgctctgttgccttgaaaatatttaggaagtgccagccaggtgttggctcccattgctgccactatgatcgtcagtggtgttggtgtgatttgtgctaggacctcgggccagccatgtcccccagggactcagtttccttatgcagaaactgggcaggattggctgtcctcaagcattggttgtttttagcacccctgaggaacttcgtacaaatccaggcgccctggttcctccccaccctctccctctagacccactgagtcagaatctcccaagacagggcaactccagggacaggcaaactgtctcatgcccaccaaggcctgagtgccatggggaagggcctggggggctctgatgggtcacagttggggccttctcctcacctaacccatcatcctctctccctcacctgcccagggcctggagattgtgaacccacaggcggcagagaagaaggtggctgaggccaaccagaagtatttctccagcatggctgagttcctcaaggtcaagggcgagaagagtggccttatgtccacctgaatgactgcgtgtgtccaaggtggcttcccactgaagggacacagaggtccagtccttctgaagggctaggatcgggttctggcagggagaacctgccctgccactggccccattgctgggactgcccagggaggaggccttggaagagtccggcctggcctcccccaggaccgagatcaccgcccagtatgggctagagcaggtcttcatcatgccttgtcttttttaactgagaaaggagattttttgaaaagagtacaattaaaaggacattgtcaagatctgtccttggggagtgatcatttttcaaacagccggggcaactagaagaatcagagctgtggagctttgagaaaagagcttggccctcgggtccaagcggtgtctaggcccactcccttccccgttactttctcgtcatgggatcccagaaggaaaaagccctctccaaccccctggagagccgcagtcactttgatagcaaatgatgtggctgccaacagccgcagatctcagcgcaggccgaccgggattgctgtccacctcaggccagcctcctcacctttccaagcctccacacctacgcccaggtgcccaggactggaaagaatgcacagaaagcacttagcatgggacttgccatcagcgccctataaccaggtcctgttatgattgggttttttagagacggggtctctgttgcccaggttggagtacagtgatgcgatgaagctcactaaagcctcaaactcctgggctgggattacaggcatgaaccagcacagctggcctcctggttaatttaaattttttttttttttctgaggtggagtctcgctctgttgcccaggctagagtacagtggtgcaatcttggctcactgcaacctctacctcccgggttcaagcaattctcctgcctcagcctcctgagtagctgggattacaggcatgtgccaccatgtcccgctaatttttatagtttttagtagagacagggtttcgccatgttggtcaggctgttctcgaactcctgacctcatgatatgcccacctcagcctcccaaagtgccaggattacaggtgtgagccaccaccccagccccatttttaaattgtttatagacagggtcgtgctctattacccaggctgggcttgaactcctgtgctcaagtgagctttccacctcagcctccctaagtgttgagattacaggcttgagccgctgtgtctggcctcttattattattattatttttttttttgagacagaatctcactctgttgcccaggctggagtgcagtgggatgatcctggctcatggcaacctccacctcccgggtccaggtgattctcctgcctcagtctcctgagtagctgggattacaggcgcccatgggttttgtttgtttgtttgtttgtttgtttgtttgtttttcagacggagtcttgctctgtcacccaggctggagtgcaatgacatggtcttggctcactgcaaactccgcctcccaggttgaagtgattctcctgcctcagcctcccgaatagctgggattacaggcgcccgccaccacgcctggctaattttgtatttttagcagagacggggtttcaccatttgggccaggctggtcttgaattgctgaccttgtgatctgcccgcctcggcctcccaaagtgctgggattacgggtgtgacccaccgcgcccggccgagatggggttttaccatgttggccaggctggtctcgaactcctgacctcaactaatccgcctgcctcgtctcccaaagtgctgggattaccctgtgcctggcccagcctcttatttataaccagtgttgagggactgtgtggagccgggcacaggcgaagcaggcaggcttcctgccctggtaggacctggttgctataaaagtcctgccaggtgagcagaaggagcacacttcccctcccctgacctccagtcactgagtctcgggaaccggggctcggccaggagcgcctttacttggactgaggggaatgtggcctgcagacagtcaggagagtttccaggggacagcaggggctgtcctagcgggtggcatgaaaccgtctccctggagaggttaaggaagagcaactccaggggttccatttactatgtgctccggagctgggctacacggtggtactaaggaggcagcgctagtcacctgacctacaaggtcgggcttctgttagttacctaagagatgttaccaggacaagcagcagcctggtgggaagatgatgcctccaggtctctacctcctctctctctccctccttctctccacctcccctctctctccctccctctctccacctcccctctctctcttcctccctctccacctcccctctctctctccctccctctctccacctcccctctctctctccctccctctccacctcccctctctccacctcccctcactccaccttccctctctccacctcccctccctctctccaccttcccctctctccctccctccctctctccaccttccctctctcctcccctctccccctccctccctctctccaccttccctctctccacctcccctctccccctccctccctctctccacctcccctctccctccctctctctcctcccctctccctccctccacctcccctccctctctccacctcccctccctctctccctccctccctccctctctccaccttccctctccctccctccaccttccctctccctccctccaccttccctctccctccctctccaccttccctctctcctcccctctccctccctctctccacctcccctctctccctccctccctccctctctccaccttccctctctccctccctctctccaccttccctctctctctctccctccctctctccagctcatgctatctgggtctccctctgactttctaggtcctgtctgagattttgctctttctgttcccctctctgggcctccccgtcaccactctgtgtatctctggatccctgtccttcaacccagagctctgtctctggacctcagtggcaatctctaaatctctctccttcctcaagtcaaaaagtcgacacactcaggaggttcccttgagtggctgaactaccccaggttgtataactcaagtctgttttctcaatgttatccctgaccctctgggtcaaccctgtttgaaaatgacaacctttgctgatctctacatactggtctgccagggaaggacccgtggtccacaaccctgttcagaatcccccatctcccttggccaaaatatccggcatctaccaatggggctgtggcatgagggtgtcaatctcaggaaaggaatcttgagtcgcctgggcctgcagccctcgtactttcagaacagaggttctcagaatttaatgcgcttcagaattacactgaggacttgttaaaacatagttgctgggcccagagtttctgattcagtctagggtggggctcaaaaatgtgcctttcaaacaagttcccaggtgatgggtacgtgcctgacccaaggccacatttcagaagcactgctctagaaaagaagactctgtaagcggctcttacgctgggcgcggtggctcacgcctgtaatcccagctacttgggaggctgaggtgggagaatggcttgaacctgggaggcagaggttgcagtgagccgagatggcgcccctgcactccagcctgggtgagagagacactggctcccacctcaagatcgttttagttggtccagtgtaagcctgggtatctggacttttttattttttatttttattttttgagacggcgtcttgctctgtcacccaggctggagtgcaatggcgcaatctcgggtcactgcaacctctgcctcccaggttcaagtgattctcccgcctcagcctcccgagtagctgggattacaggcacatgccaccatgcccagctaatttttgtatttttagtagagacggggtttcaccatgttggccaggctggttttgaactccctacctcaggtgatccgcccacctcggcctctgagagtgctgggattacaggtgcaatggcgcaatctaggctcactgcagcctctgcctcccgggttcaagtgattctcccggcccggcctggcctctaatttaaaaaaaattttttttttttaaagttcctcaggtaggccaggcgcagtggctcacgcctgtaatcccagcactttgggagactgaggcgagcggatcacctgaggtcaggagttcgacaccagcctggccaacatggtgaaaccccgtctctactaaaaatacaaaaattagtcgggcgtggtggcgggcgcctgtaatcccagctactcgggaggctgaggcgggagaatcacttgaaccccgggaggcagaggctgcagtgagcctagattgtgccactgctctccagcctgggggacaagagcaagtcttcgtctcaacaacaacaacaataacaacaagttcctcaggtgactctgatgtgcagccaagttggaaagtcatcgctagatccgcggtgtgcaaagtgaactgcggaccgtggactgcggcacttgttagaaaagcagaatttgcattttaacacattcctaggtgattccggagatgtctgagaagcgatactttgtccaggggccacagtttgaatagcaaagctctagaacaataactctaggcttcattcccgttgtctgtgtgtgggcctacgaatatgcattttcgcaagcattcctcctcccccttgcctcagaccattctgatgcgggtggtgctgaacggctccatcctccttcacgttcacctctccctgggatttatcttactttccaccacctagacaggaaggggcgaatctggcttcccatctcggttgtgtgaccctgggcaaatgcctcccagttcgtggaagtctcagtgtctagttaagttttcaatcacaagtcattcctcacattcattcatctattcctttgacaaatggttactgactacttcctgcgtgctaagtgctggagatgcaaaatccagacagggaaaccgaataattacgaaaatgacggtagacgtacaaaaataaatcctaacgaacaaggcgcgcaggagcgctccgcccgggagggaggtcagggaagttttctctccaagaagacaacagagctgagacctgaaacgagcaggcattagggagccacccgtctcctctgtaccttctgcagcgtcctcaacacactaaggaagcggagacgcagaggagaatgactgtcccaccatctggtcgcctaaccaggcaggggcaggacaaaaactccatgcctcacgcttcccaaccaattctgctatgcacggtgccagagacttaaagcagtgtctctggtccctttcttctttcactcagcaaataatgaatttcagagatgtgccaacatagaggcacttggagaaagacgaggcagctgagagggaagctgcttacctggccgggacgcaacggttgcgaccaagtcccacttctgccagctacatacaccctctttcacacgctctacgagcagctaccgcccactcgccacgctattggtccaactagcatgaatgataacttttagggccaacgaagaaaaaggggtggactttcttgcccagctcctcccacttggccctgtggctgttttgattggcagatgacttcggctcggcccccgctttaaaggcacctgtctgtctcccattaggtacgcggcccctaacgcccacactccatgccttcctccgctttccccacccacttccaggaccaaccaatgacttcaaggcagaatatgcccccgcaaccaattaaaaagagctctaaacttgacggacgacttcccgcccctggactgtcgtagctcctcccccagaccaattgttttaagagaggggggcggatacatccaatcagcacgacacaggtctcttgattgacgttcgggtcctcgcgctggcgtgttgtgccctgaggcgggaggaggaggaggagcggggaggaaaacctgagccaatcctagcagcctgcgcgggaggccaatcgaacgccgcgccttggagcgatcacccaatccgcgaaagggggcagggcgcatccctgccaggaaccaatagaaagcctccaagggtcaggagcgacgttcagcgggagcaatgactggcctatattcgggactcgggggcgggtcggcgccagagacgagaagagaggaggggaggcctcctccgccgccgccatcttggaccgggcccggtcagcttccgcggagccatcggcagacgccgcggcctcccttgagccccgacccccgtcgtcagaacaaccccgggcccactcccccaaccccacttccgcttcgcgccgctatcgcgatagcgcccgggcccggggcgcgagaaaaaggcggcgggcgctcgcctcccccgcctgtcgcgatacgctcctcagcggcggcgccagctcctgtggtgagagcgtcaggctcgactgggccggaccccttcccttcctccccccggcgccatcggccgccctccccgccgcctcccgccctggcgacaccgccgtctgtcgcgacatggcctcccctcgcctgccccctgccgccgcctctgcagcgcggggctcccggcggggggcggctccctccctctcgccctcccgttcctgcgcctctttcacgttcctcagcgcctcccgggggtccttccgcgacccggaccccgggccccgcccgccgccgcctccccgcgtggcatcgcgtcgggccccccggtaggggtgtgagggtgcgaagcctcccgggcgcgaggtgcccgcccctctccgcgtcggtattggctcctggctggaaggatggaggcgcccctggtcccaggtgcccgccctctcggggctcaggtgcctgcccccctcggcctcggtccttcgcgttgtggggcagcctccgcgccggggcttctccctcgacggtggcggggagggggggtggtggtcgggacgaggaccccagctgggtgggggagtcacccttcccaggaccgaggccgccctccgcatccctcctcactgctcccgggagcgcagcctcccctggatctcaggttccagctgcccgtctgtatcggatgggagcctcttgggagaggagtggaggagaaactccccgttagttggagcctttgccgaagtttccacctctgtagtctgcagctcttccctctcatagcgagtagcgccctgggtggctccagcctcgccatcccgctgcactgggcgcctgcctttttgggggagtttggctttcccccacctggggtacaggaccgtcctcagtgtggcccacgtctggtctcagctctcacacttctttgatcctggcgtctgcccctggctttgcagccttgaactcccctgcatcgtgactctccgaccttctgggtgtgggcgtctcccagtgatatcaggaccactgtggtcttgttgctgggggctgctgggatcccctggcgctcaggtgcctggtgaaagacactaagccgccacgctgtccatgttagtgagctcccactgcgggcagcaccagcccctctttctgagcagtccctgcctctcagtgcagggcggccacccaccccggggtgagctctcctgtccttttggtgaggggttttgatgtctcccctccctcccttcacccctgcctgagtatgaggcttcttccatcttcacaccagtctcctcctttagggtgtcagctctccaaggaccaagaagcccactgcccttgatatttgcatcagatcccacactgtgggtttgttgacttcccatctacccttacgctgggtgtcagcagttggagaacaagggtttcgccttctggccccgctgctggtaccccatgagagtaggaagcttcctagacccgggttcctgtactgcgaggtgggggctcttccctctggggctgtgccttctctccagggtaaggaccctttcttggtgtcacctcccccagggataaggttcttgccatccttggtattggtatggctgcttttctggatttgaggtgtccacgcctctgcatgtgtccccaccgtaaggctgaggacccctctcggatgcaggtgcccccggctaatgcttccaaaaccccctcttgatttgtcactgtatggggtaaggcatagtttcctggctgtgtggatgtaagatacctgagtctcaagcgggagactccactgtagaccctgtccctgggaccagagacttctctggtgtagactttccaaggtgggagattccagccccccacccttggcatggggcatctcagtggagatgactacctctaccccaggccctaacgcatccttcttctggagtctcagagcctctgtgtggccacgtcagcagccacctgggttaaggatcacccttcaacatcacttctcagagctccttgctgcagaggcggaagctctcccagatcaaaggtgcctcatgacaaagaccactctgtgggcacatgacggcccccaaggttaaggaccacccggtgttagtttcccagggctgacctcctgcccctccctcctcgagtctttgtgtggtggtatcatcttccctgagatgaagtctggggggctcttctttactggttttggctctgattttagcgtgttggctcctgtgaggctggtgtcctgctcacctccccccaccccgccacccgccttgtgggtcccttccctgtggggatgtgtgttcctcttgggtaagtctcctcctgggccgaggttcccagattcctcagtgctcttggagagcctttgctgctggagcacaggttcttcacgcctgagagtggacctgcgatcaccaccttccttggaggatcttggtggatgcccccctgactacagcaaatggggctctttcttctctggcggcgtctctgcttcgagactcaggctccagcttcccttctctctggtcctttgctggggggaccagaggtacagataccctcatgatatagggattttcttagcggggaaggtgttgtctctactgtggctaaggctccagcctctctaggggacaagtaccctgggcctctggcacttgccccttctctgtggaggagctgcctcctcactgggtctcagctgtagccgacttcgatgtcacactgttctgtctgaaacatcacctccctgggttagcgctcttgttcccctcctcctggcttgtgacccctccaggacttccttctcttgctgccacagtgtggtctcctgtctgtgggtattcttcctctgcactaggataccagtcctttccgtgtggagacacagggagggcgtcacctgcctaaggtgttgattgccttgtttaggggtgtagaccatgagacctcttctctctctgggctggagcacctgcccatgaccctctgttgggttcttgggatggaaagagggagtgtaaactctcgtttcacattcttgttccccctatgcagtaagaggcttttctgtgttggggtgttggactttggtgaggatccctgcacacctgagctctggtgtccaggcccttgccttgtgtgagctccctgggtcaaagaggctttcccctcctcagcctgaatccccactgtggcaccttctcctgggtccttttgttggttgctttgccttcttagagattccccaggtagggcgtgatagctgacctgggcgggggctgctgcggctttctttaggttgggccttttactgaggagatttaaattccctcaagtgtaaggtagcacccctacctattatcacccagaatgggtccctgcggtgttgggaaaattctccctgggggtaaggtaccagccctgtcctttgtgggcttcttgttctaaagcatatccgtcccatatggttgctgctagtcacatgtggtgattagtaactagttaaaaatgaaaaattcagttcctccattacacttgccacatttcagatgttcagtggccaacagatatgcgcaaatagagtgtttccagcattgcaaagttctgttggatagcactgtttgccagatgttcccttctttgtgggtgaggactcttttggtgtgacttccctctgtattgaggctcttgttcctcagtatggggctgtttctgtctttacagtaagtgactactccagggttccctgccctgcacacgtagagtgggagcggcccgtggatcccagggaactgtgcttttcattgtaggccccctccctggaggggaagagggcaatctccgctggtatctcagaagtcttcttctgaggcataagcctctcttcccagggctcccctggtctcgctgtcaggccctaaggtatgtcttcccttggactaaagctccttggaactcccttttgacctcagtcttctctgggttccaggtaacttcctttaaaataaagacgctcctctcttgaagttttgggttcctgccctgatggtctatgtctccctgactctaaattaccaatccacttgctatgggattcctccgtgagtgcagatcggctccctcacagctgcggtacctttgcaccctcttatcttagtaagatttctgtcttctcccaggtctctcttgggtactgccttctgcccccaaatctctaagccttcttggtattagcttctttgggttaggagtgttatttccttttggtttaaggatcctgctctggaataaatgtcttggtggtttgagtcccttctacttggcattcagccctgtctgcatgagcgggttcagctcttcacagctttcggcatctctgctcgccgtcgttttcccccacccccaatctttcttctcctacctacagcttacacacacacacacacacgcccttctctgtgagctgccagtttcatttgtctcctgacttgtctgagggatgacctctcctagccacctctgcccagcccctctgagtaggaagtgtgatctccagggctaatgcctccatcccagtcatcagctgtgtgcagcatgactgtcctgctctgaaaaacctttttgagtgtattctggggagaaggtactccatgctctaggaattttccacttcctgagtcagaggcacacaaaaaagtatgtaacttttcttgtttcaacaaacttatggggtcccctgttggccagacactatgctgggcagtcaagcgagcatcaggagaactggggctggtctcttgtcagatagcaaatgcttcttctctttaccagtcccacctacctcactatgctgactaggtccatgtctctgggtttttaccagccagggaatacgtgttaattcctctccaatctctcctagcagcgtccgtctccaagagagtatgaagagagtgcgtctgtagggcagggaagatggcggacaagcgcaaactccaaggtactagactgacttcctgctgcacctgtagccacatgctccctcttctgaggactgctctttagatacctgccacctgggcaggattctcacagccttgttcctccctggccaggtgagattgatcgctgcctcaagaaggtgtccgagggcgtggagcagtttgaagatatttggcagaaggtacaggggctgagaccctaataatctgggtcttcagagaggagggcacaggaaggcggctcaggacctctgggtgttgaccagcgggaggggctacatatgcagatgctgaggacctaagagaatcagctctaagatggattgggggtaggggttggggggggtcctcgagtccctagcataaggaagaatcactggagtgggtactgggacatcccctcccacactgacttctcaattctctccatccctcagctccacaatgcagccaacgcgaaccagaaagaaaagtatgaggctgacctaaagaaggagattaagaagctacaagtgagggggctgggggcctggacgcctttgtcctgagggtagagggaactgggagagtggactgctgggtcccagggagaaggagctgtgggccccagttcctgggtcctgaggtctgactttcttgcttttcccatctgcagcggctgagggaccaaatcaagacatgggtagcgtccaacgagatcaaggacaagaggcagcttatagacaaccgcaagctcattgagacggtaggagcccagagcctgagtcccagagaggtgggaaggtcaccagattcttgagatcccaaggggcggaggcagagcggccagaccccagaggtcctcaagagaagtaaggtttctgcacctaagggaagtgaagaggcagcggactcagagctcagaaagtagggtcacgaggctcaggtcggagtgtctgctggcccttagtcagctcctttcccacctttgagagcccccctgccaactgcactctctacagcaaatggaacggttcaaagttgtggaacgagagaccaaaaccaaagcttacagcaaagagggcctgggcctggcccagaaggtagatcctgcccagaaggagaaggaagaggttggccagtggctcacggtgagttggggtagagaagaggaggtgaactctgaggatcctgagccctgggtgtaggcggaaccctagctgatgggcttcctcttcctctccctcccctagaataccatcgacacgctcaacatgcaggtggaccagtttgagagtgaagtggagtcactgtcagtgcagacacgcaagaagaagggcgacaaggatgtgagtgagggagacccgacacctttgggatggggatgggcatgggaatgggctggccagcaggaggccagtcatttatgctcctgggagttggggcctggattcctcaggcggacagggccaacagccgggattagggatttgagagacaggattgggagggcttagcagctgcacgcgtggggcaggaaggaggtcagacagaatctcagggtcccctgggtgtctgggtagaccgtggggcctttgtgaagaggagcgacttgggggaaggtgagtgcaggttgagcttgggccacagagtaaaagtgagacctgaaggacacccatggcaagaggcctcctggcacccagagggccctggtcctagggagagcacagtgggtagagacaaggcagaacatggagaaggcagagaaccaggcctgaaggaagacaggagtctgggacaaagctggatgttggggtcccaggttctaaaatccgggattgtggggtatgagttcaaagggatacaaactgtacagacttgctgaaaccagaaagacagggaggggagagccgggtcctcagggaagctgtgggtgggagagggtcaggaagtggaagatgacagggttgggtgtcagactctgaggggtttgggaaccaggggctttcggggagatgatgggtccttgaacagagcagagatttggaaccaaggctaagatgttaaatcctaaaggggccttgaggggagggcaggagcgaggcttaggaatctgggctctctcagggataaatgggtagggttgggggcctagtgatgacagatatcacaattctaaacagcaagctcctcacaaatgggggttatcattgttactgctggagcaggtcggagggtatctgtatgccagaggcagtcacagtggtgggcgggctcagttgagaaatctgggctgtcaggtgaggtgcagatggaggccaagtcgtgggatggcacaaggacctctgggtcttttagaggtttccaaggactcctggagccagaaaggtgtggggagaggagggagcagtgggatcccaagatgtcaaggctaagattggtccccacagggctcagagggtgggtggaccccatactgccccaccccgaaggggatggcgtggaggctttgggtctccacaggggtcagggactgaggacaggttctgtgggggcaggaggggccaagcaggtgctctgcagcccctgagcctggccctgggctcgccagcagaagcaggaccggattgagggcttgaagcggcacatcgagaagcaccgctaccacgtgcgcatgctagagaccatcctgcgcatgctggacaatgactccatcctcgttgacgccatccgcaagatcaaggacgacgttgagtactatgttgactcatcccaggaccccgacttcgaggagaacgagtttctctacgatgacctggacctcgaggacattcgtgaggccctggggctgatcgtggcacaggaagtgagggcccagaatgggctgtgtgagccagctaagcatgcccttcttctgcccccacagcacaggcgctggtcgccacctccccccccagccacagccacatggaggatgagatcttcaaccagtccagcagcacgcccacctcaaccacctccagctctcccatcccgcccagcccagccaactgtaccacggtgaggccccacgggacactagtaccttgtgtttccagcagggcaggactcgaggagacaaatctgggtcactccaaagtggctatgggagcgtaattgaggaaacacagatctaggtatccagggtctaggctcttggagcacacgctaaggtcctatatctgggtccctaaaggacataaagagcaatagggtgcatcccgcgccagtttaggtcctggatctgggaagtgggaggggccggtgcctgggctgcctgaggaggctgggtagctggccaccttgggcagggatccaagggttggcttccctgtggagagcaggttcccagatccttaagaggctggtgggtcagtgctggctcccagaaaacaagaagactggagagcctgaattgagatggtttctccaggcagattaaggacagccatttgaccagctctggggccgcaatggcagtcaattgggcccaggtccccggggcattcagagattggcggttctccatcagagccccagaggtcacacaggtttctattctgcctcccctacctcaggaaaactctgaagatgataagaagaggggacgttccacagacagtgaagtcagccaggtgggtgtgagcctggaccgggtgggcacgccattcactcctctgttgcttcccaaaggcatcttgaggcctgagcgccggccactgtgctgggctggtggacacaggtggctcagaaatcagtgctgccctgagggcaggtgggcagggcaagtggacaggtgactggtgctgtggtcaagggggtagcacacaggtcacccttggcctggccaggcagtcaggagatgctgctgtggagtgccctgggcttcacagtcaggtgagtttgcctggcagggagaggtggcagccagtaacatgggcaagttgtgacagaaagtttggaagtgaggagagatgagtctggccaggtctgcagggccaggggcccaactgtgagcacagggactgggactgtcaggctgaggggctcaggctttgtggacctgagtggcctccagagtccaataagcctaggaagcgatggggcctttgctgtgctgataatacacactgcaaatttctgagaggagacggtggcgggcagtgcttcttcaactcctttgacatctcccaggacaggagcacgctttcggaaacgctgctacagaacaatgttaggcaggagcagcatgggcctgaggcccctctgtgggctaacgggatggatggttccaaggggacaccctgagtgggcattgaggaggctggtgtggagactaaggggacccgcaggtagtagtgagggcgggcaacagggccaggaggtgatgaggagagacactgaggcaggtactccaggggccaggctgggctctgccaccttcccaggcccccactgccaagcagcgatgcccaggagagaagtgggtagtcagtcctgttgggcgcttggtaagcgcaaggtgcctgtggggtggctggaaagaagcccaggaggtggttaggctcagcagcccgagtgctgtccgcagattgcctgcggtagggataccatgagcacatttaccctcccaccactttctggagtgctggtaacttccagccctgtgagtagcttctgtgacccttcaggtgacattcagaattactatccaatttccagctgtttttccttctactcttggacattaggcggctccagctaatctcatattgagaacacttaagtgtttcccactagtcctctggcttccaacagatggatcttctctggctgacaacctaagttgtgtgtcagatccctgtgggggtgtccatggggcggtgtccaggcaggacttgggaagctgggcaggctggaaatcagtgtgagtgttttaagcatgaaggtgattgaagccatgagggtgagtaaggtcacccaggtccccaagagggcaggagcaggtgggggcagcgaggccagagaggaggctgctgggacaaagatggagcctgaggtgggggtggtgagggagaccagctggcccactgggtcctgaccctctgctctctcccacccgcagtctccagccaaaaacggctccaagcctgtccacagcaaccagcaccctcagtccccagctgtgccgcccacctacccctccggccccccgcctgctgcctctgccttgagcaccactcctggcaacaatggggtccccgcccccgcagcacccccaagtgccctgggccccaaggccagtccagctcccagccacaactcgggcacccctgctccctatgcccaggctgtggccccaccagctcccagtgggcccagcacgacccagccccggccccccagcgtccagcctagcggaggcggaggcggcggcagcggaggcggagggagcagcagcagtagtaacagcagtgccggtggaggggctggcaagcagaatggcgccaccagtgagtgaggaggcagcggggtggggggcgtgggcggggctgggcagcaggcagcagccctttccatttactctttgttcccaggttacagctcagttgtggcagacagcccggcagaggtggctttgagcagcagtgggggcaacaatgccagcagccaggccttgggccccccttccggcccccacaacccacctcccagcacctcgtgagtgtctcggccatcggcagggttgggatggcagccttttgaaacagagaggcgcaggcgcctcacccccgcatcggtgggttctgaaccccccgcccttgctgctgggaatggccaagcgctatcctccatctccctcgggtgttacacccccacttctttccagcaaggaaactacatcagcctccctgctttgcccttcagaacattctaaaatacgttctcatctaagtggaagttttctcaagagccccataccctttcctccccatttctgttacctgcctgaggccaattgactgccaccggagggtcactgtttcacttttcaaagtgaattgtcccgaagtccttattcctctgcagccactccttcaaatcttagctcagaccattccactgggtctgcctgtttcccgaagaatgccctaagaaagatcagtgtgcacaaaggaaaggcctgcttcctgccccctcaccccagctccagctggcctgcccaagggggagtgggccctgtgaacacctgcccagggcaagtggttttgatcagcctgtggcctggtggagcacccgagaatcctcacccccacccccacagctctgctctgctgatgagaaaccattccaaagattgggctctgcctttgtttgcccagagaaccacttctttctcccatctgtctgccctcacctgcccctctcagatcccatctgatctgtgcagtctcccctctctccagccaggcctctctgcccatcccaccctcagggaccctcctctcaaccccctcttccatgctctctctccaggaaggaacccagtgcggcagccccaacgggggctgggggcgtggccccaggctcagggaacaactcagggggacccagcctcctggtgccactgcctgtgaatcctcccagctccccaacgcccagcttcagtgatgccaaggcagccggtgccctgctcaatgggcctccacagttcagcaccgccccagaaatcaaggtgggctcctcggacatcccccgagcctctgtgtcctgactctgttgtttctttcctccaggtctctagctgcaccccttgcccccaccctctttctggatctctctctggctttctgtccccttctcacacttgctctttctccaggtctttctgtaccaccctccccgtgaccttgatctctgggggctctcatacctcctctcttgttccctccaaagctctgtttctctgggtctcttttcctttctcttggttgcacttgttgcttgctctctctgggtctccatcttcatcccccccgcaggccctcagtttctgtccccgtttgtcctcacaaggcatagactggtgtactttctgcacaagtagaaagactggttgggtgaatgcagcctggttccaccctttaggaagcttccctgctggggcagctgcagggaaggttgcggtgggcccaccgaggggcatctgacctgacctgggagacaggcccaggaaggtctgagagggggtgatgtttaagctgagacctggaccaggcaggggggctaacagctgcaggaagggcttcaggaggtgctttaggaggagcatgcatctgcctgtgtgcttaggaagctgggcaggatgcagcagagaggagagaggtgtccactctgcaggagacagtgccaccagctgcagggctgagatagtgggtgtagcaggataggacggtggggtcctgatcatcgagggtcaggagctggggcttggcttgtgagccagtatactgtagcgcagcttccatggggggaccagtgtgtatgcccaggctgtccaggaggcagtgtgcgcgcccaggctgtccaggaggcagtgtgcgcgcccaggctgtccaggtccaagtcttggcattgtcctttctgtgccttcatctgggaaacggcaatagtcacgattatacctactatgtagggttatttggaagactaaatcatcctcataaagctcttggaacagtttctggcccaacagaagcattaattttttttttttttcttttttgagacagagtcttgctctgtcacccaggctggagtgcagtggtgcaatctcagctgaatgcaacatccgcctcctgggttcaagcgattctcctgccgcagcctactgagtagctgggattacaggcgcctgccaccacgccaggctaatttttatatttttaatagagatggggttttgccatgttggtcaggcaggtcttgaactccgaacctcaggtgatccacccaccttgacctcccaaagtgctgggattacaggtgtgagccaccgtgcccggcccaaattttagaagtaggtggacaggatatttatagtgcgtgcatttttctggaaaaagggaaacagcagctttgagattttcagaaggggtccatatcttttaacaccaccaacaacaaaaatgaatcgctggggtgggtggtcgggaaccatggcaaggtttggagtagagaaggaacaacatgacttcattggaaaggtcccctggggctggtgaggacaggatagagggagggtggtctgggcaggagaggacaggcctgggctgtgtgggacatggtggcacgacagggaagggagccatccagtggggtttagaagcaggacggatagctgggcgtggtggctcacacctgtaatcccagctcttagggaggcagaggcgggaggatagcttgagcccaggagtttgagacctgcctgggcgatatagcgagacaggatggataagccttggcgactgactcgttgtggagagtccagcacagggctggggtttgggacagctgcacgtggctggaggagatgggaggaaccagccctgactttggggaacagaagcctgctgtaacctttgtaataggaaacgaggctgtggctgcggggctggagacccaacctacctgtttccagcaaggagactgaagcctagccgggctgggcccaccccgattccagtcaccccatgccagtcacaggcagacagctgagcatgtagacctcctgcctccttcaagacaggcgggagctctcccagcgtgtaggtgtccctagtgaaggagcgtgtactattggcacatcctttgacaaaaatggtagcgcactgtacatattctgcaggttggcgtttacttctgtagtatgtcacgaacttgtattttgaaaatctcggcgtagtattccatgctgcagagtcccactcacgagacgttcctctgctgatgaatgcgtcgtggtctccgattgtttccctacagtttgatgcttttacctgtcatgggtagattgtggggagtgggtcgttggccctccacggcccccaaacagggcaggtgagagcatctggggcctgtgtcaggctgcacttgctcctgcagcccaagtgctcaggccaggcctcttgtttcctccccaggcccctgagcctctgagctccttgaagtccatggcggaacgggcagccatcagctctggcattgaggaccctgtgccaacgctgcacctgaccgagcgaggtgagggacccaggatggtggggaagcagcgggccaaagaggaggggctgcccctgacccatcctcaccactgagggggccggacccccaccctccccacagacatcatcctgagcagtacatcagcacctccggcctcagcccagccgcccctgcagctgtcagaggtgaacataccgctgtcgctgggtgtctgtccactgggccctgtgcccctcaccaaggagcagctctatcagcaggccatggaagaggccgcctggcaccacatgcctcacccctctgactctgagcgtattcggtgaggggccacagggaagggggatggtctgggacttgagtcttacggaggaggcagtggctgaacctgtgaggctgtgggtagagcaccaggcccctgacttgggctctccactgaaggtcagcaccgccctgggtctttctgtaccacctccccccgcagggatgcatgtctgagcacccttttgatcacgacaggactagtaggcagctggcactgaccttcctgttgctctcacaggcagtacctcccccggaacccctgtccgacgcccccctaccaccaccagatgccacccccacactcggacactgtggaattctaccagcgcctgtcgaccgagacactcttcttcatcttctactatctggaggtacagcagggcccccggggcagcctcgggccccccggcttcgccgccaccgccgccgtcccccctcgggctggaggggtgaggtgggtgccccactgcggccactgggaccgcaccccctccctattcccactcctgggcccctgccccaaatccacctgtccccgtccccgccttccagcccagagatgttagaactgcttgggttgacagcgaggctggtccactgaggcacacctcagccccgcttccagttgcccactggctcacccgcggcccctccccagccctgctccagcagccccagtctaggccgaccccactctgctcattggcacattctcaggcctccctggagaccactggggagctgtccagccccctcccaaccccagtgagtcatgagtgacctccaccctcatccccacttgggaaattttctaaattgcctcctctctcagctctcatcacacattagtttttcttccttctcaaagcttctctgaaagcaattttcacctcctgtctcattttccttctcctgatcagcattggtatgttctgtgcccccagccccatctccaagaggattgtccagcccaactgtggtctgtggcgggggccggggttcagccctgatgtcctgccccattcccctggctccccacccagtttgggggccccctgatccccctctccactgttcctcccccagggcactaaggcacagtatctggcagccaaggccctaaagaagcagtcatggcgattccacaccaagtacatgatgtggttccagaggcacgaggagcccaagaccatcactgacgagtttgagcaggtgagggccccgccccctctcttcccgctgctagggttggggtagagtccccaggctccaggcagcccctgctggcctctgctcccttgcctccacctttcagctggcgcagtccctcagcctgaccaagtactcctccctctggctgtctgctcagcctggaacaccgccctctcatcctccacttggccagctcctaggcctcctgtaggtctcagcccaaatgtcccttcctcaaagaaaccttcctggagccacccagcccagtgcctcccctttgcagtgctgggcacactcgcctggggtgtgggattttcccagtatgtgtccctgcaccaggctgtgggctctgctgccgagggaccttgatggcccccacttcacctccaggtcccagcactcagcagggcaggggctcagtgcggaaactattttttttgaatgggcttctcaagttctaatactgggaaattcctgctgcttgcaaacactctggaaccaacctacctgggtttcagcccagtccagctgggcgactctaggcaagtcactcgaacctctgtgtctcaattaacttatctgtaaaaatggggggaagaccacctacctaatgcagttgttatgaagattaaatgagttaataacatgtaagtacttaatggtgactgctacatagtcagtgtcatggattttttttttcaaattactttcagttggtgtgttctacagtgatgtttttttccaccaaatacttccctgatgccgagccccttcatggggatgaagtagtacaaggtccttgtcctcagagaactcagtcccctctcctggttctcccaggttgccatctttgaagcacttaagacattcatttagaacctaggtcctctcccattgtgtcctcagatgttaaccacagacttcctgtcctttcctggtttggcccaaaaccatcctccaagttagtacatttcagggcatccagtcattcagaaattcccacaccacttcgtcaccaataaaatgtccctgcagagtgcttggatttagactctgagactgttccattctctagaacaagggtgacagtacccactgcctcgaggtctttgtgaagattaaatgctaggctgtgcatcctgtactcacgtgagaggtgctcaaaagccacagccctcgaggaaacgaaggctgtgcactcacacctggggctggggccccgttctggcagctggcttcggtggaacctctgcggccccctccgtttcctcctcgctgaagtggcatgataacatttcctacccaagaagaaccttgtgaggatggatgagagtgtgtgcgtgcagggcagctggcccggtgcctgacacatccacagccctaagaattgtcccctttgtctgttggtccggcccagatcccagaccacctcctcgtccactcactgaccgccttctcccccggccagggcacctacatctactttgactacgagaagtggggccagcggaagaaggaaggcttcacctttgagtaccgctacctggaggaccgggacctccagtgacaccggcccctccctctacccacccccttcccccgcatgctgatccccctgcccaggtgagggccctgccctggaagactggagggaggccccaagccacggggcatccccctctcccaggaagcagggagggggccgggaggttttcctctcagccccaccctgggggcccgggggcgagggctgccccctcctcccctccccagtgagggacattttttggtaaacctattttcattttggaaaatatttatgaataaatagttttatatgacggctggcagcagcggcctctcctgtaccccctcaggagtcagtgagtaaggtgagggtcctgctggcgggggcgccgggccagctgggggttgaattgggagttgtaccgccgccgccggtcatccgtctcgtcttcttccggctgaccctcctgtagtgcccggccttggacccgggccagcagggcctctgcccgagacctctcagctgcttccctccgcagacgttcagctcgaagctggtccagggatggaggcctgtggggagaggagtgaggtcagaaagctggtagcccctaggaggccattcccccaacctctcccatagagggagctgccgcctggaagccccgctgcatccagcacaccccagcctcagctccttaggcctgctggaagcagccacttggtgctgggacgccatgggcacgtctctggccttcccttctgtgggctttggtcctccccagtctttaaaatctgatgcttctccaggtcaagaaagcacacttagcagccccctggccctcagtttccctttctagaggaaagaagactacaggcagtgtaccccctctagaccaggggtgcagcatcctggagacagaagcctgcttttactctctaacccagcagctctcaaactctttggtctcaggacccctttatactcttaaaaaccaaggaccccaagagcttttgtttaaatgggttctcttaatatgctgcaaatcattagtgaaaactaagaaagtttggacacaagcatctgccattggccatcagagtgagggtgtctccccatcacacagcctctggaaacctgcactacatgcctgagaacacgagtggaaaagtccaccagtgtcaggaaaataggcttgacaccacagcaccccgggaaagggtgtcaggacccctagggctccctggaccacatgctgagaaccacttctccacctagccagcccttcacggagtccctggctgtcctgaccagagacgctgcagtgcccatgctgggctgctgccaagccctgaaggtctgggccctggtctgccgaggtggggtcttcttactccttgggtcgctgcttctcagacccctccttttcctttctgctgcgactgccttcatcaccgccgtgctgtctcttcttccccagatgcttctgcatctcccgcagagggtccagacggctcttgatcttctcatctggggctgggccgggcggggggccccctcgccctgggggtagctggtaccaagggggttgagtctgtgcctccgctgcactctggcccaggtatgtcaggatgcccagagctttctcttgcctctcctgagggggccaggaaatacaagagatgtgatataatctttcaaggtgtcaggtgtgtctccctgacacaggtatctaagcgaacaggtatctaaggcttgttatgaaccagttggaccaggtgctggggatggaagacaaacagaggcaaagctccccctggggggacagtagcaggtacagtaacagcaggggaaggaggggacaagtggagccacttgagtgttcagaggcaggcatctttgcagagagacttgaagagaagcctgaagggatcaagcaaagcagaggagcgatgggtggggtcagcaagtccagagacagcagataaatgacaagagctgatgtacctcttttttttgagatggagtctcgctctgttgcccagactcgagtgcagtggcacgatctcggctcactgcaacctctgcttcccaggttcaagcaatcctcctacctcagccccccgagtagctgggattacaggcacacaccaccatgcccagctaatttttgtatttttagtagagacggggttttgccatgtttggccaggctggtcttgaacttctgacctcaggtgatccacccacgttggcctcccaaagtgctgggattacaggcgtgagccaccatgcacagccactgatgtaccttttacacttgatcttagccaaaaagcaagaggcgattgattcactttttgtttgattgttttgagatggggtctcgctctgtcacccaggctggagtgcagtggcgcaatctcggcttactgcagcttccacctcctgggtcaagcgattctcctgcttcagcctccctgggattacaggcgcgcaccaccatgcccggctaattttttttgtatttttagagataccatgttgaccaggctggtcttgaactcctgacctcaggtgatccacccgcctcagcctcccaaggtggtgggattacaggcgtgagccacagccggctgatttaaatttttaaaagcccatcaggtttgagactcctccagtttggagaactgagcggtttgcccagcagctggggacctctagcatctacctccaacccctgtgggcgcccagacggcaatagccaacgctttttgagtgtcatgccttggtatggtcctaaattctgtgtgttcactcttgtttgaccttggtcacaaccaatggctaaagtgccccctccctccaactcgattcatggcccctctgatgaagtgggtgaggccagcttactttctcctgtcgcttttcttccttgtactctttattgcctctgatcactcctttcccttcctccagcagctcccgaaacaggtccacagggccagaacctggggctcccgcctctgctgcttcaagctcaggcagtgagttctgatgtctggctttcttccgtaggaattctgtacgggcctggggagaaagttataggcaggacattcagaacctagaggtaattcaagaactgtgagtctggtgcccaccacagaaaatggcagtccagggtgctggggttatgagaaagggagcactaggcgcctaaaagaggcacctgtcctagctgggggtgagggtaggcagatgaggcaacgcctgggttttgtaaactccctttcaaatagtaaaccacgggtcatcaaggatgtatgggaggaggtccctggcctaaaccaaaggggttcctaacctcaagtgagacaattaaaacagccataaaggtatgcattaggccagacgatctgaattctagccatggctccaagtgactaccccaagtctgctgaagccctgtcccctgccttcaggacgcggatttcaaacagcgctcagcagcctactgagattctaaaaacctagactacctcccacccacggcggaggatcagactagctaaggaaatgaaagttgggtgtacaccaaacagatttaaagagccatacggaaagcccgtgtttgtgtgtatgtgtctagggggcggtgcacgaaagggctcgcccgatggcgtggagcctggctgtccgcctctccttaaaatgtgccttcccctcactgaagccatctcacttcgtgcaacagagatgacagtgcccctctaagaacgaacagtgcttattggggattccgcaagtcaggtgcacggcatgtagttagcatacagtagatgctcaataaataggctgtgcaggcaaactaaaaagtgatccgaatttccttgaactgtccaagggttcacggattcattaaatgttaagcttctcttttgtgctagacactgttccagccatgtgaaatacatcagtgggggaaaaactaagacgagggcgagatcaaggaaggtttcgtggaagtgggcacaaggtttgcggggcaacgtcctcgaaagtgggatcggcgcctggtcccgaatttcacacggggcacattgagcctgcgcaacgcctccgcttccggcccccaaccgcggcgcctgcgcgctgggccccggagcgccgccctgccggcttccgagcttacctcttgctgagccagcagcaccctccgctcacgctccttctcctcctcccgggcctgggcctcgtcacgccgcacgcgggcgacattgtccttgttccggacgtgccagctcttcttgggcaagatattcatggcgtcgtagctgtccagggactggcacgcccgcctctttgcacttccgattggcgagaggatgcccccctttttcttgtccctacttcgaccgcggattggttccgaattagttggtacggccccctggcctgtagcgacaggtgattggctgagacgccctttatcacagcgaatgctaggcgttcggctcgtggtatcccctagcaaccgcctcttgtcacagatctgaaccaatcataagttggcccgcccctgatgctaccagatgcggccgtcgattggccgacatgaccgacaagtctccttgcggaagagcgctctgcaccgacaaacatgcccgtacatttgattggctcctgccccgctgtagccctgcccccaccttcaggacgcagatttcaaagcgcgctcagcaacctcggctgtatttattgatacaaggaagatcacccgagagtcagggacgtggcggcgaggggccctggaaatctccagataccaaagctggaagggcgtggagtcttctccagttctcctagtttacagatgttgtgacctaggcttacaatgggcctggggtctgaaagcgggacgtgggctgcgggggtcaaagagccggtttggtggaggtcagcgccacagcgcgccgtgccaggaagactttattctgcgcctcctggggcaaagagaggtggaggtgagacaatcctcttccccaacccctttccatgttccccaggggccctctcagggacccgcctggctcaccgtctctctctgacgtttgagctcagagatgaggcgtccgtaggagttagccagagccacagtgtacgccatcaggatgctgaaggagacaggaacggaagccactcctgacacgctcttccattatatccaaacgtctggctccttcgaagccagggatgtggacgcctaagcccctcctcgtctgggctcaaggagttcagtctcccagcccctccgccttcagatccaggagtcctacgtcccgcccacctcctccttcggacccagcagtccaggagcctaggcctcctccctcagactcagtacgttgcctgctcccacgcccaagcctctcctctcttggacgcaggtggtggcccccagatcacacgcattcaaacccagacccagaagtctgggccgtctcacctggagatcagcagaaggggcacagcaaaagcctgggtccccaggaagaagaggaaattctgggtggtctcagggaggctggaaatagactcagggatctgggcccagatggacgactgcccccggaatggaccacacagcttagaaggcgggatcctgaagtcaagacaggctgggctcacatagtgccaggagtctgaacactgaatggggagagagggagggagagaggcgggagcctctcgcacttacaggaagatgctgtaaagcaggggaacgctggagatggccagacccaggagaaggaccaaggggaaaaagaaattcgccgcggaggcccggaaggtgcgggcagccggggagcaggtggagaagagggtaagctggtgggggaaggcacggagaaaagggctctgaaacacaagagtctgtgcctccatttttttttttttttttttttgagacagagtctcgctctgtcgcccaggcttttttttttgagacagagtctcgctctgtcgcccaggctggagtgcagtggctctcactgcagcctcccctcccgggttcaagctattctcgtgtctcagcctcccgagtagctgggattacaggtgtgcaccaccactcccggctaatttgttttgctgttgttgttgtttgtttgttttctctttttgagacggagtctcgctctgtcgcccaggctggagtgcagtggcacgatcttggctcacttcgaccttcacctccctggttcaagcaattcccctgcctcagcctcctgagtagctgggattacaggcgcctgccactaagcccggctaattttttttgtatttttagtagagacggggttttgccatgttagccaggctggtctcaaactcctgacctcaggtgatccacccgccttagtctcccgaagtgctgggattacaggcgtgagccactgcacccggcctacctgcctctccttttttccgaaccaggagtctgagccccttcctcatctaggaccccggagtctgagtccccagatcctcagacatataagtcagaatgccctagacccctcctctcagatgcagtagtctgtcctccaaccccctcctctctcaggaccgagtaatccaggcccccaggatcttccttgcccttgacccaggagtgcgggccccaatacctcctgcctcagacccaagggtcccccctaccccttaccttcttcaggtagaaaagcagcaggaacttgaccgtgttaagcaggggcagtaaagggcagaaaaaactccccacccagaccaccgtctgcgcgtagatgagccccagcacctcgtcgggcacctggaactcttgggtccccgccagacgacccagcgccccaggacagaggccacagaggagcctgaaggacggggcggggccgggccggagtcaggggagtggcggcctggagtttccacgcctccaccgccccgcccgccaataggaagcatgcgtattggtggtggggggggggggggcgggactttcaggactccacgtggagggggtgtgtccagagggcgggtcctgaggactagaagggacccagatgtcgccgccgtcggggccagagggaagtaacccactaaaacaagggcggggagcggggagatctgcggacctagggcaagcaaagggagcaggcagaggcgggaatggtaaaaaggtgcgcggtgaaaagaacagcgcgatggggcacggcctcgtcctagaggggcggggccacagcaaggggcggggctctcactttctaggaaactggatgagcagcgcgactgccaagacagtcagcagatcaaagagcagaagtttgtacatttcctggcccaggacagtctcccagcactgaagaaggaagaaatatatcagaaagaactcgggacccgggcacctggaggcccacgcgtccgagtctccacatcgcaagcctatgagaccctgtcaatactttctctgggggtcctcgtttttcaaactttcatacccttgggagagtgttccagcaccccaagctcccctctccgcccaaaccaagagtctggacccacccagctccatctttccttcagggacccaagagtcccacgcacacccatgccgttctcaccggaagttgtttgtaattgtagccacaggttttgcagtcctcagcctcggagtcgcccccacaagtgatctgattccagagagagaagagcaggaccaccagggaggcgaggcgaagaaacacggtcctgaaggggggaaggcagagaatgggccctgacccggtacccaccatgtggcagttcccttctcagtggaacgcgcccgcattcaacccatctcacagatgaagctgaggcccagtgacagaatcaggatttctttctttctttctttcttttttttttttttttttttgagacagggtctcactctgtcacccggactggagtgcagtggcgcgatctcagctcactgcaacctccacctcccaggctcgagccattctcctgcctcagcctcccgagtagctgggactacagaagccactaccgccgggctaatattcgtatttttactacagacggggtttcatcatgtttgtcaggctggtctcgaactcctgacctcagcctcggcctcccaaagtgctgggattacaggtgtgagccactgcacctggccaacagagtcaggatttgaatccctggattcggtatcagcaggatttccgtgtcttacctgtcagcgccaacatccctctgaccgcccccacccttcatcattcccagccatccccgtgaggctggaacctgagcaggataaaaacgatctggcgactccgagtgtagccctccagtggagcaatgagcttgaacacgggcggcagcacaaaattgaccccagcgatgaagatggacggaaggtaattcaccccaagcttcagcagtggcaactcctggacaaggggcatctcctgggagcgggatggaccatgagtagaggcttggggtcctggaggagccaagcttaaggtcctccccccggcctcttcttcttcttcttctttttttttttttttgagacagagtctcgctctgttacccagcctagaatgcagcggtgcgatctcggctcgctgcaacctctgcctcccgggttcaagtgattctcctgcctcagcctcctgagtagctgggattacaggcgcccaccaccacgcccgtctaatttttgtatttttagtagagactgtttttcaccatgttggtcaggctggtctggaactcctgacatcgtgatccgcccgcctcagcctcccaaagtgctgggattacaggtgtaagccaccgcgcccagcctctctttttcctttaaaatccctaagtccagggtccgaacataccctctcccatacttcctctctaagatctctggcatcccaaacttccgtcccctccctccaccgttggaaatgtaggttccaggaccccctggcttcctcttccaagaccgtccgcacctgcagctccacggtgcaccccgtagcccagtagacgccatagaaggctgcccccaggagcgcgaccaccagcaggttgagcagcacccgcaccaaccaaaccctggcttgctggcccagcgtccgcaccgcagcctggcgccgcaccactgtctcctccagctccacctgaaggcaggagagatgcccgcttggactccatttcccaaggcgcgggcctcccggttccccaggtctggctctccagagatcctccttaacgtgaactgatgcagccgtctccccacccgctaacaacctctgcagtcctggttccacctgctccaggaaaccagcggccctttacagccccgccccttcgcggccggatccagcaacccaagcccccatccctccgcggtcaatctcagcaccccaggccccgcccctgaggctccgcccagcatcccaagacccgcccctggtcagccctgcccatcagaggctccgcccccaggtggccctgcgctttattcctggcctgaagttccagttcagctgtatcaagacgccctgctggccgctcccatcacttaactttgaaccaaattgccttaggccccgcccgcttcttgtgcttacttaaaaaaaaacaaactttttttttttttttttggtagagagggagcctccctatgttgcccaggctggtctcgaactcctagactgaagcgatccacctgtctcggtctcccaaagtgctggggttacaagcattagccaccgatcccagccctggcgcatccttttcctacacgcttggagctcgggcagccctatctcggcctcctctcaaccttctcattccccaggacctgcctttcttggagaaggagctgcttagcatctctccggaggccccatcaccgagttaggccctgtgcgttatctcagcccggtcctgtctggtccctacccagttgcagaccccgctccctaatcgcacctttaattcgtacaagatgatgcgctggcgcagccgcacgtggacgtccccgcagagaccgaagtcccaggccgagaacacccggtggctgtagctggtcagagcctcggactccgccagcagtgtctgcttcagcccagacaccgagctgagaggggagacccgggagacgggaagtgaaaggacagccaggaacgggggttatggggagacccctcatattgggacaaatggggaagatgaaccctaaggccttgggtactaggcgagttcccaccagaccagatggggaaagagtcaaagaggcggagacacagtcattgaaggcaaagtccaagggagattcagagacagttctggggtgcaggcaccccaaagagaggcagaaacctaggagacagggacagagcctcggagcgaagggggcagaaacccagagtgagagaaacagaggccctgaggaagacagagatgtggaggagggacagaggccccagagggagattcggagaaagggagaaaaagacagtgagaaaggggaaactacatctacaaaagatgggggtcaaagacccataagaagtacaggcacacagagaagggagctgcggcgggaagagccgagaagaagacagagacccagagaagatggcaggtaaagactcaagagagggggcaggccaggcgccatggctcacgcctgtaatcccagcactttgggaggccgaggggggaggatcacctgaggtcaggagtttgagaccagcctggccaatgtggtgaaaccccgtctctactaaaaatacaaaaattagccaggcgtggtggtgcatgcctgtaatcccaactacttgggaggctgaggtgggaggatcacttgaacccaggaggtggaggtcgcctccaaaaaaaaaaaaaaaaaaaaaaagacccagagaagacgggcaggtaaagagactcaagagaggggggcaaagacccaggaaggagatagagaaccccagcaggggcagaaacagaactggacaaagagaccatgtgcaccttcactgccctggccccggcccccatcatctctcatgtgaacaaccacagagggccctcacatggtctccttgcttccacttgtgcccgcatataatccattctcagttcttgagccagtgggaccttcttttgatgcaactcagaccgtattcccctgtttaagacctattccagggcttttcccttctcttaaaatcgaggctctttgccgggcgtggtggctcacgcctgtaatcccagcactttgggagaccgaggcgggtgcatcacctgaggtcaggagttcgagaccagcctgacaaacatggtgaaaccccatttctactaaaaatacaaaattagccgggcatggtggcacatgcctgtaatcccagctacttgggaggttgaggcaggaaaattgcttgaacccgggcggcggaggttgcagtgagctgagatcgcactactgcactctagcctgggtgacagagcgagactccgtctcaaaaaaaaaaaaaagttgacttttggccaggcacattggctcatgcctgtaattccagcaccttgggaggctgaggtgagcagatctcttgagcctaggagtttgagcgcagcctgggcaacatagcaagaccctgtctctataacattaaaaaaaaatttttagcaagacatggtggtgcacccctgtggtcccagctgctcccgaggctgaggtaggcggatcagttgagttccggaggcccaggcttccggtgagctatgattgcaccactgcacgctagccgggtgacagagtgagaccctgtctcaaaaaacaaaacagactgggtgcggtggctcacacctgtaatcccagcactttgggaggccgaggcaggtggatcacctgagatcaggagttcgagaccagcctggccaacatggcgataccccgtctctactaaaaatacaaaaaattagctgggcgtggtggccggagcctgtaaacccagctacttgggagggtgaggcagtagaatcgcttgaacccgggaggtggaggttgcagtgagccaagatcgtgccattgcactccagcctgggcgacagagtaagactctgtctcaaaaacaaacaaacaaaacaaatgaaaaacaaaaacaaatcccaaaaccttgatcttttttttttttttagatggagtttctctctgtcgcccaggctggagtgcagtggcgcaaactcggctcactgcaagctccacctcctgggccaccgctcctggcccaaaaccttgattttaactcacacagaataaagggttacacagcaagaccgaggattctggggccgggcgcggtggctcacgcctgtaatcccagcactgtgggaggccgaggcgggtggatcacgaggtcagcagttcaagaccagcctgaccaacatggtgaaaccccatctctactaaaaatacaaaaaagttagctgggcgtggtggcgggcgcctgtaatcccagcaacttgggaggctgaggcaggagaatcgcttgaaaccggaaggcggaggttgcagtgagccgagattgcgccactacactctagcctgggcaataagagcaaaactccgtctcaaaaaaaaaaagactgaggattcttggggagggggtttctgccaccaccacttgcttccccaccccaacccgtcccgtcaggggtcaggggtgcaggtgccactgaccgatgcaggatgagcaggaggcagatgaggccaacggcaaaggcccagcacaggtaggtgaccgccaggcgtgggcggggcgggtagaagccatagaagagaggggaccattccaggtaaccctgtggggggaaggcggcgcaggggccactgtgggaggaggcggggctcctggagctgcacagtcagggtctggggtcagggtttgaggttcgtgtcattgaaggcactggggtcacaggtgggcggggaatcccccagggacccaggcacctacctcacccgagagcaagttgaagagctgggtggcaaaggtgaccaggccctgggagtgggggttataggagccgcagggcgaggagatgtcggggccgggagggcctgggggagcgcctcccaaccaggtgggcagcagcgtcatgcaggccatgagcacagaggccagcacgttaagaaggagcaggaagcgcagcagggagaagtaggactccgtgccggcgccaaactggcctgcagggggcagcagagagaggctcaggttccttcccgggagcaggaccagcccctcctacccctggactggggtccagccgcgccttcctttctttctttcttttcttttctttcttttcttttcttttcttttcttttcttttcttttcttttcttttcttttcttttcttttcttttcttttcttttcttttcttttcttttctttctttcctttctttcttctttctttccttccttccttccttccttccttccttccttccttccttccttccttccttcttctttctctctctctctctctctctctatatatatatatatatttttttttttttcttttcttttcttttcttttttttttttgagacggagtttcgctctgccgcccagcatggagtgcagtggcgcgatctcggctcactgcaacctccgcctcctgggttcaagcaattctcctgtctcagcctcacgagtagctgggattacaggcgtgcgccaccatgctcagctagtttttgtatttttggtagagacgggggtttcaccatgttggtcaggctggtctcgaattcttgacctcaggtgatccacccacctcggcctcccaaactgttgggattacaggcgtgagccaccgcgccaggcccagccgtgcctttctcagacccaagagtccagacccccagcccctcctccctcagacccaaaaatccaggcccaagcccctcctccctcaaacccaggagtccgtccccagcccctcctccctcagacccaggagtccaggccctgcccccaggacaccacccaaaccccaccgcacccccgatcctcttcagtgtccacgcccagggctgcaggcttcgcaagccttcctttgttttctccttggacctccgaagtagccgcgcccatcggtccgtcttagttccagagccatagaccacctggtccctgctggcatttctttgcctgggagggaaacaggcagaaaatgaggggtttcgcagccccagactgggaaccatctgaatgtagacacaatccaacagtagaatggagaagtaaattgtggcctatacataagatagaatactctgtagcaataaaaaagaaaccagctgggtacagtggctcaggcctgtaatcccagcactttgggaggccgaggtgggtgaatcacctgaggtcaggagttcgagaccagcctgaccaacatggtgaaatcctgtctctactaaaaataccaaaaaaaaaaaaaaattagctgggcctggtggcgggtgcctgtaatcccagctacacgagaggctgaggcaggaaaattgcttgaacctgggaggtggaggttgcagtgagctgagatggcgccattgcattccagcctgggtgacggagtgagattccaagaaaggaaagaaagaaagaaaagaaagaaacctaatgctaggcagaagaagccagcacaaaagactgaagactgtatgattctatttgcacaacgttgcagagcacagcttgcaaagctctacagaaaagcaggaggctggagtgggaggatcgcttgagcccaggtgtcggaggctgcagtgagctgagactgcaccactgcactccagcctgggcatcagagcaagactctgtcaaaaaaaaaaaaaaaaaggttagggagaagaggttaccttgtatttgtgaggaaaaagggggtgtcaggggagggacgcacagggtgctgtcatgccgtgtcacttgccctagctggagtttatctgggctctcactttatgaatacagccatccctcagtatccatgggggttggttcaaggactccccaagaatactgaaatctgtagatgcccaaattccttatataaaacggtatagtatttgcatacaggctacacacatcctcctgtgtttgttttattttattttattttaatttttatctgatttttacagacaaatgtctcgttttgttgtccaggctggagtgcggtggtgcaatcatagctcaatgcagcctcaaacttccaggctcaagcaattctcccgcctcagcctcccaaagcgctggggctacaggtatgggccacgacacccagccctccaatgcactttaaatcacctctagattacttataacacccggtacaaggtaaatgttatatagatagctgttcttttaacttgtattattttttgtcatattgttactttgattattacttttaaaaaatagagatgggggtctcgctatgttactcaggccgcagtatagtggctatattcacaggcatgatcccactactgatcggtgtgggagtgttgatacattgttattttttattgttttttccatatatatacacatatatatacatatatatgtgtatatatatacacacatatgcatatatatacgcatatatatttgagatggagtcccgctctatcacccaggccggagtccaatggcacgatcttggctcactgcaacctctatctccctggttcaagcgattctcctgcttcagcctcccgagtagctgggattacaggcacccgccaccacacccagctaatgtttgtatttttagtagagttggggttttgccatgttggccaggctggtctcgaactcctgaccacaggtgatccactcgcctgggcctcccaaagtgctgggattacaggtgtgagccactgcaatgggcccataatcatttttgaaggagggcacctgcattttcattgttcaccaggccctgcaaattatgcagtgagaatgggaaaagaaagaagttaaagagagggaggcttggaagaggaggcaaagatgaaggaaggtataaagcagagagaaataaatattaacagattttggacacacacacagagagaaactgaggcagagacaggattggtggagaccagggagacggcaaatcccagagagaagagaccccagagccatcgaaaggcagcactcacctggagtccgaagtagagacaaagatgaggggaagaaagaaaccaagagaggcagctctgagcggggcagagagaggccccagaagccaggagcggcagaggacagagggaggagaccgagtccagggtatgggagaagggcccggtccgggctgtgcgggtcccagctggaggtggggcctcacctgtgtgcccgtctggcctgcatgggccagggcagttcccgggaagggtgagggtcctgcagctctgtctgggtgacttctgtgaaggcctttctgctccttcctccatcctcctcctcctcctccagcgccccccaaggcagcaccccagggtctcggtaccgaagggtggcagcactgggcagctcgttcagcacagaagacagcgatgggcctggggaggagcagggggctgggaagacccgggagtctgggccctaattcctcctccctcagaccaggaaaccaggtccccggcccctcctccctcagacccaggagtccaggcccccggctcctcctccctcagacccaggagtccaggcccccggctcctcctccctcagacccaggagtccaggcccccggctcctcctccctcagacccaggagtccaggcccccggctcctcctccctcagacccaggagtccaggcccccggctcctcctccctcagacccaggagtccaggcccccggctcctcctccctcagacccaggagaacaggcccccggcgcctcctccctcagacccaggagtccaggcccccggctcctcctccctcagacccaggagaacaggcccccggcccctcctccctcagacccaggagtccaggcccccggctcctcctccctcagacataggaatccaggcacccagcccctcctccctcagaccaggaaaccaggttcccagcccctcctccctcaggcccaggagtccgggtgccagcctctacttcccctggacccaggggtccacagccctcaactccatccccaagcgtggaaccctcctactccagggcagtggagtccaggctttaacttccttttccctctagctcaggagtgtgggaacccagcctctcctattcccaagacacccaaactcccagcccttagccctcccctcctcccagactagcctggttctccaggctcctcctcctcagaccctggagttccagcctccagttcccttctcccccataatatcaggaagtggaaccttctctctttagccctcagactcaggaggccaggcctcccctttcctcctccagcaggactcccacctagcctgaaggtcggatggatctgagcttctcctggcattccctacctcctctggcctcccggggggccagccactccctagaggagccccaggcttctgattccaaggtcgggttttcttccatggccccaggctgggctgtctctagtggccaccaggcagacactgccccaggtaagggaggggccaggggcaggtgtgtacctggccagcaggtggcccggagggagtaaggtacacttcctgtggtttctcagggccgctgatgcgaaaggtctcctgggagctgaagtccccgtggtgccccgggcctcacagtttggttcctgggctgggcgggggggctgtacctcaccctgggacttggtggactaagtccttcccaccgtttatcacccagatacctgcacggacacgatgcctttgtgcaacactttattgggaaagatttacacacggtgacctgtcataggccaagcgatgagaagagggcgccaggagtgctggggtcccgaggtggctcagatggaagccatgggacggccgtccccaggcccgcgcacccgcacctcagtttcccctttgtgaaatgggaagcttatgcttccttccaagtctgcaatattggtgcgatgagctaaaagtggagcgaaagacacaaggaagaggcttcccactcccaggacctgcccccaagctccgaccccacattgtggatgcaaagaaagggaatttgcccaaaacccactgcccaggggccccttccgttttggggaagtgcagtgctctctggatacccagaagctggagcaggggccagtgactcttgtctggacaatactttgattttgtaggagtggaggtggcctctgggcagagggcagggaggacacccccgggtctgcttcagttgcaggcagggtatttagctggggaagaggaaattctctccaggaccctctccaaggtaaggactctttctggggaggagacagcagcctggttcacagaattcccgggaccagctggcagagggagcgtcgtgacagcttactcctcccggagcttctccggggcaaggctggtgggctgggatgctgccttccgccggctggggctgcccccacctaaagccagccccagccccagggctgccagggccaggaagtggatacagaagtagatggaggcccagtaccgaagggtgtcggccaaggagagcagcacgaagcccatgcacatgtagtcataggcgcgcatcttcaggaaccagtgcacccagtcccaggccttctggccccctgggctcagccgcccccgcagggctgactccagccggccctcggcagccaggcacagcgggatggtcaggaagctcaggtagtagcccgggtggaggccgtgccagtaggcgctcagcagcatggtccaggcgctcctgaggaggaggctgggagtcaggacctacgagtccaggtccccagtgcccactgcccccagatccaggagtccaggaccccagcccctcctccctcagaccgagaagtgcaggcccagcccctcctccctcagacccaggagtccagaccccaccccttcctccctcagacccaggagatcaggccccagtccctcctccctcagacccaggagaccagaccccacctccctcctccctcagatccaggagtccagaccccacttccctcctccctcagatccaggagaccagaccccacctccctcctccctcagatccaggagaccaggccccaggccctccccactcagacccatgaccctagctccggaaggcggaggaggctacaggcctctgtctccttcagggatccaggagctcgcagccttccatacacactcagtcctatcaagaccctcttcttctttaaagatttaacattttatattccactgcccttcctctcccaggaccaacaagtcttaattcttcagcccagtggttttttttttttttttttgagacagagtctcgctctgtcgcccaggctagagtgcagtggcgcgatcttggctcactgcaagctccgcctcccaggttcacgccattctcctgcctcagcctcccgagtagctgggactacaggcgcctgccaccacgcccggctaattttcttttctatttttagtagagacggggtttcaccgtgttagccaggatggtctcgatctcctgacctcgtgatctgcccgccttggcctcccaaagtgctgggatcacaggtgtcagacaccacacccgggcagcccggtggttcttaacctggggtcccaggtctggcatcagcatcacctgagaacttgtgagacatacaaatccttgtccccaccccttttgcaccagaagccctgggggtggggcccaggagaagtcttccaagttaacaagtcctccagtgactctgatgcctgttaacatttgacaactcctgcctggctcatgaagatccagaagtccctggcctgtggtccttccttattctgggcccaggagatatgttcctcttcctccaaggcccagcaccatctttcctcactctttttatttttttggagacagagtctcgctctgttgccacacgacaaggctcactgcagcctctgcctcttggattcaagcgattcttatgcctcagcctcccaagtagctgggattacaggcaagcgccaccaaactcagctaatttctgtattttttgttgttgttgttcagacggagtctcgctctgccgcccatgctggagtgcagtggtgcaatctcggctcactgcaacctctgcctcctgggttcaagtgattctcctgcctcagcctcccgagcagctgggactacaggtgcccaccaccatgccaggctaatttttgtatttctggtaaagacggggtttcaccatgttggccaggatgctctcaatctcttgaccttgtgatccacccgccgtggcctaccaaagtgctgggattacaggcgtgagccactgcacccagccatttttgtatttttagtagagatggggtttcaccacgttggccaggatggtctcgatctcctgaccttgtgatccacccaccttggcctcccaaagtgctgggattacaggtctgagccaccgcgcccagcctctttttttttctttgtaaagatggagtcttgctatgttgacctggctggtctcgaactcctgagcttaagtgatcctctcaccttggcctcccaaaatactggaattacagatgtcagccattgcacctggccaactcttgttttcttgagaagggaggaccattggctttctggttcttcaagagtgcggaggctgggtgcaatggctggcacctgtaatcccagcactttgggaggctaaaaatacaaagattagtctgtcatggtagcacgtgcctataatcccagctactaggggggctgagacaggaggattgcttgaacctgggagggagaggttgcagtgagccgagatcacgccactgcacttgagctgtaaaataaacaaaaacgatggatcctgtgcattttaaggtgtttaggagcatccctggcccccacccacgacatccgactagcaccttccagttacaacaacatgtctccagggattgccatgtgtctcctgggggtgcagcagcagcacagttgcccccagttgagaagcacttgtctaaacactggggtgctttgacctggcctcagccccagagctttaagcgtcatctatacctggccagatgcagtggctcatgcttgtaatctcagcactttgggaggctgagatgggaggactgcttggggccaggagtttgagaccagcctggtcaacacagtgagacctcatctctatacattttttaaaaagtaaaaaaaaaataataataatacttaaaaaattttggccgggcatggtgactcacgcctgtaatcccagcacgttgggaggccgaggcacgcggatcacttgaggccaagagttcgagaccagcctggccaacatggtgaaaccctgcgtctactcttggcacgagaatcacttgaacccaggagatggaggttgcagtgagctgagatcacaacactgcactccatcctgggtgacagagcatcaaaatactaatactaatactaatactaatactaataataatatccttcttactcccaaaacttactcttcctgggtcttccccttccacatttatctaattaaattaaattaaattaataattatttttgtttgttttttgtgtttttttgtttgtttgtttttgagacagagtctcgctctgttgcccaggctggagtgcagtggcgcgatctcggctcactgcaagctccgtctcccgggttcacaccattctcctgcctcagcctccccagtagctgggactacatgcacccgccgccacacccggctaattttttgtatttttagtagagacagggtttcaccgtgttagccaggatggtcttgatctcctgaccttgtgacccacccaccttggcctcccaaattgctgggattataggcatgagccaccgtgcccggcctattttattttattttgagacaaagtctctctctgttgcccaggtgaccttggctcaccgcaacctccgcctcccgggttcaagtgattctcttgcctcagcctccctagtagctgggattataggcgcccgccaccatgcctagctaattttttgtatttttagtagagaaggggtttctccatattgcccaggctggtcttcaccatattgccctgacctcaagatgatccacctgcctgggcctcccaaactgctgggattacaagtgtgagccaccatgcctggctatgagttctacttctgttttttttttttttttttttttttttttttgagacggagtctcgctgtcgcccaggctggagtgcagtggcgagatcccagctccctgcaacctctgcctcccgggttcaagccattctcctgcctcagcctcccgagtagctgggactacaggcgcccaccaccacaccagggtaattttttgtatttttagtagagacagcatgtcaccatgttggtcaggctggtctcgaactcctgacctcatgatccacctgcttgggcctcccaaagtgctgggattccaggcgtgagctgccgcacccggctgagtttctgcttctaaaggctgcacagataacagtgtcaagcacagagtctccactcgagaaatattggaagaatgaaaaacaataaaaatgaatacacagcacgcacttacctgtcaggcctcacattaaatacatttcacattttatcacatttagtccttctatctacctatgaaaccagtaataaatagcattcactccattcaacacttgaggcaactaagaggtcaactaactcctcaaggtttctccataacctggacggccaagattccaggaaggctggctattgagtccacaggactcagtacattgcttctgctgagtgaggctgactttacagaagtagcaactgaggccccgagagggggaacgattttacaccggcatgctgccactataattagaggcagggcaaaaccaggctaaacaaactacaattcccatgagcctccgggggcaggggcccagccagggacgctgcaggctaccctggggcctgctgggagatgtagttctgcagtgtcacctgagactgggcgggctcactcaccgcaggacataggaacgggcaggtgcgctcttgtagatatactgcgccagccaccactgcaccgtcatgttccagtaccgcatgccatcgcgcacccgcacgcagaaatctgtgctgtagcagtcgatgttgcggatggtctcatagtcatactccaaggaagccgccttctccggactggggggtggaggatgagggtgggggacagacatgcagctcagccaggccccctcccgacgcctgctagtgtcccagccccggatgctaaggaagggatcctggccaggcaatggccctctggctgtcagacttgctagggcagcaagggagggtggcccagagggtgcctgtagggtaggaaggtgggtgggctgggtggtacagtccactgacaatggggttcttcttcttttggtacctaatggggcccgccacagccatgaaaagccttgaagggctatggttgctaagctatgagtcctttagcaaccaagctcagtatattcagagaagccgccaaggatggtcccttctaaattgtcggacactgcagttgccagggaagttgtggttatcatccctaataacaaggtgcttcacggttgctagggagatgttccaggcgccagtggggtccccatgatctttgttgctaaggaaaaggcattccttagcaacaatgcctaggatgtttagaaaggcttttaggaaggggcttttttcctggtcgcagtgattattggagaagtgtcacctctagcaatacagtggctccctcatcactcatgtcgacagccccagcagtgggaaacactggcccatatgaagccttggtggcctctgatgacaggaggggagccatcctttaggagtgaggaccgagcagatttagaaaaaccttcaattcctgcttggctttactagggggacatcctctctctagcagctggaggtcagggcacggttattagggcagtggtaacaaattcccgtgggggtgtcactacccccacaacagaatggcagtttgtgacgactaggggacaaccctagcagggagtagtagttcatcatttacatcaacaggctgttcccccagccgcagtccaagcccctgggggaaggctgactgcagctgtcaggaacacaagggcagtctactcctggttgccgggggtgccatctccctagcaacacgggggcaatacttcctcagccacaagagagtccacagctatggccgtgcgacttgcctagcaatgcaggtgccggggggtggagcctctctggcaacaagggtcaacccatagtttccagggggaggtttggcttccttagcaacagtgtaactgtagttggtaggaatggcgtgccctctgctggggaacagcactggtcagggattggaaattgctatttccttgcagagggctgctgagggctgctatgtgaggacatcccacggggtggagcagtgctagctcctagcaacaaaggggcagtgcagggagtgccgtatctgcagcaacagagcaaaacttctggtaaaaaggaggtgagctactgttgctagggatcctgcttccctagcaaatagtggcgttctgttgctagggaaccgtttccctagcaacagagggtgacccaccactagcaaaggatggcatccccagcaagcaggaacaatctggttctggggggtgacacttctgtggcaacagaggggtggcacagggttgctaagttaccaccttttcctagcgacagggggcagttcaccacactgcggggtgacaagcgctagcaacaaggggcatctgtcagtaccagggatcttttccctaccgacaggggctggcaggccatggttgccgagggggcgacactctgctcaaaaaggtggtggccctggccccttgctccccgctctcctcccggctaggggcagagccagcccttggaggtgggggctgctgggtcttgggaagcctccctcgcgccgcctgacctgctggggggtgggcattggagggtggggccgcctccggcccgggctttggcggccacggggtaggccccaaagccggcggcaatgcagccgcactcggcggcaatccaggccacgtagaagcgcatgcggaaggcgaagaagacggggatcatgtagaagaggcgggcgggcagcgggcgggcgtagaaggcgtcctcgcgcacggcctccagcgggaagaggtgagaggagagcaggaacagcaggccgaagagcggggccggccaggcgcggcgcagcaggggccgcaggctgggcactgccccggggaagggctgctccagccagtccaggtaggtgcggtagcggaagaacgggcctgtggggcggggagggagggccgcggtcagacaggcaggtgggcagagctcaagtctgcaggaggaggacagggagcttggaaggaaggtgggaagagggagtgagaggggcagagactgggcgccggggagaccccaagggtagggactgagaccctgagagatggggataaggaacgagagacaggggggacaagaaactcagagagacagagacagtaacagaaaaacagacagaggggccggtgcggtggctcacacctggaatcccagcactttgggaggcctagctgggaggactgcttgagcccaacagttggacagcagcctgggcaaaacggcaagaccccatcactacaaaaaataaaaatcagccaggtgtggagggcacctgaattcccagctactggggaggctgaggcgggaggatcgtttgagcccaggctgcagtgagcagtgactgagctactgcattccagccagggagggagggagggagggagggaaggagtgaagaagggaagaaagaagggagggaaggagggaaggaaggagggagggaaggagggaaggaagaagggagggaaggagggaaggaaggagggagggagggaaggagggaaggaaggagggagggaaggagggaaggaaggagggagggagggaaggagggaaggaaggagggagggaaggagggaaggaaggagggagggagggaaggagggaaggaaggagggagggagggaaggagggaaggaaggagggagggagggaaggagggaaggagggagggagggagggaaggagggaaggaaggagggagggaaggagggaaggaaggagggagggaaggaaggagggagggagggaaggagggaaggaaggagggagggaaggaaggagggaaggaaggaagaagggaaaagggaaggacggagggaaggaggaaggaaagaaactaggagatagctgtggcactttagctacaatatgatggtggtctggcctagggaggaagcagtgtgattcacagaagggaccggggttaaaatttttatatgttcacaaaggccgtatgtttaggtcaatgtagcatgggaagataaaaggaaaaaaaaaacaaattaaaataaataaataagaccacatgttgtatgattccatttgtaagcgcaatgtccagaacaggcaaatctttacagatagaaagtcaattactggttaccagggatggatggaggtttgtgggatgatggacatggggtttctttgcagggtatgaaactgttctgaatataactacacagtggtcatgtctgcacaactcggtgaatatactaaaaatcagggagttgtatgttttgtgttttgttttttttcaggaaattaaagaagccaagagttgtatgttttaagtggatgagtatgtgaattagagttccctaaagctgttattggaaaaaaaacctttgatgaggtaaacattaatgaaaaatattttctttttaaaatttcacatatatatacacatacacacatacatatatatacacacatgcacacacacatacatatgtattttttgagatggagtcttgctctgttgcccaggatggagtgcagtggtgtgatcttggctcactgcaaactccgtctcgtgggttcaagcgattctccagtttcagcctcccaagtagctgggattacaggcacacaccaccatgcccggctaatttttgtattttcagtagagacggggtttcaccatgttggccaggctggtctcaaactcctgacctcaggtgatctgcctgtctcagcctcccaaagtgctgggattacaggcgtgagccactgcgcccggccctttaattttatatttatttattttttaaaaataaaggtttaaaataaagggacgggatcttgctatgttggccaagttgatcttgaacttttggcctcaagcaatcctctcgcctcagcctccgaaagtgctaggattataggcataagcccccacgcccagatgaaaaatatttccttaagctgaaagtggaccctaagccgtgaatatttgttgtctgggaagcaaaaacatcaggttgacatagatctttacctcctttatctcttctctttgctcccaatacgctacaaggagaagagcaaggaattgcttaggttgagacagccagcttctaccccaaagcagctctggtccagcggaggtgtgagacgtagacccagacacatgcccaccctcacagcagcagatgctaggatggaggttgccctgggcagggcgggaacacagaacaggcactcagggcggaaggggacacaggagacagagcggcagagttgttagggcagccccactcacctgtcatgattcccacgtagcagtagctgtagctgagtgtctccatcagggagggcacgtcgggcagcagccccagggtgggccccttgctgaagcctgaggccatttccttcctctgggccagatgcaggtcctggacttcactggccaggctcaccagctgggcagaagggggtgggcaaggggccaggtcagactctgggcccttccccacacccatctcccttgcgcggctgccctcggcagccaaggggtgctgggtgcccgcagctctgcccatctaggttgtgtgtaacgcctctagctgggcggtgttccccagggctcagtcccaggccctcctcccctttccctgttctgtgcttacctgctctcacgcaatcacggaggtttcgatactatccacacgctgaggacgcccaaacgctaccccagccccagacctatccaatcaagtggcttattggcatttatactcggatgtctccaggcaccccaaacgcactggaaacggaacatgatgttacccaccccacaaggtagaccctcttctagtgtcacccctcaaacaacaggccaccaaattgttcaagccaaaaatctccctcactccccaaatccgatcctttaatctctctctctttttttttttttttttttttgagacaagttttgctctgtcaccaggctggagtatactggtgtgatctcggctcactgcaacccccacctcctgggggcgcaagcaattctcatgcctcagctggccaggctggtctcgaactcctggcctcaagtgatctgcccgccttgaaatcccttaagtttgagtctgttgcctctttccatctccactactgagctgaatatgttgtactctccaccctttcccaccagtcccaaggtccaccctatatcaatagatctccttcttccagcttgtggctgggttgtcagtagaaatccctggctggagacaaagtcaggagagggagggtagggcttttattcccttgtaagatggccttgggctggctgtcacccttgatagatcatttcaaggtgggtggctctacacaccctttaaaaaaaataattttggccgggcgcggtggctcacgcctgtaatcccagcactttgggaggccgaggcaggcggatcacctgaggtcgggagttcgagatcagcctgaccaacatggaaaaaccctgtctctactaaaaatacaaaaaattagccgggcatggtggtgagtgcctgtaattccagctactcaggaggctgaggcaggagaatcgcttgaacctgggaggcggaggttgcggtaagccaagatcgtaccattgcactccagcctgggcaacaggagtgaaactccgtctcaaaaaaaaaaaaaaaaaatttagggccaggtgtgacggctcacacctataacactagcactttggttggcctaggcaggcagatcacttgatgtcaggggtttgagaccagcccggccaacatggtgaaaccccatctctactaaaaatataaaaattagcaaggcgtggtggtgggcgcctgtagtcccagctactcgagaggctgaggcaggagaatcgctcgaacccgagaggcagaggttgcagtgagatcacaccactgcactccagcctgggcaacagagcgagactccatctttaaaaataaataacatttaaaaaattaattttttgtagagacagggtctcactatattgcccaggctggtcttaaactcctggcctccagcagtcctcccactatgacctcccaaagcgctgggattatacaagtatgagccactgcaccaggcctacacaaccctttttccatccaggtaccacaacctgacccatttcccctgggcctagggttgggaacggctccttctgccgggctggggttcaggcaccatcccttcttgctcttctacatcctgcccaattggtggccactccttcagtcatcctaaatgcgcgtttcctgctgcaactcagacctacccacagccagccaacggcctgtatcaagccaccacagtttgtcacctggactcggacaaaggaggatccctttatctgagtccatcccatcttgccctgttccacttcaattctccttcagcatccagaacgagttttctttcttttcttttcttttttttttgagatggaatcttgcccgggaaggcccaggctggagtgcaatggcgggatcttggctcactgcaacctccaccttccaggttcaagcaattatcctgcctcagcctcctgagtagctgggattacaggtgtgagccaccacacccggctcatttttgtatttttagtagagacggagttttaccatgttggccaggatggtctcaaactcctaacctcaggtgatctacccgcgtcagcctcccaaagtgctgggattacaggcgtgagccacccgcagctggcctagaatgagtatttctatttgtttatttatttttgagatggagttttgctcttgttgcccaggctggagtgcaatggtacgatctcagctcaccacaacctccgcctcctgggttcaagcaattctcctgcctcagcctcccgagtagctgggattacaggtatgtgccaccacgcccagctaatcttttgtatttttagtagagacagggtttctccattttggtcaggctggtcttgaactcccgacctcaggtgatccgcctgcctcagcctcccaaagtgctggcattacaggcgtgagctactgtgcccagccagaacgagtatttttaaacatttaaaactggtcacattgcctcttctggcagcaaaccaaaaatcccctcttccagcagatctcaatcctccacgggaagaagtccaatgtcctcacggtctccagccaggcctagcacggtgtcagccctgctgcctgttcccttttgctcgtcccagaaagtggatgtggctggtgtagcctgtggaacccagcctgctcccctccacacatcctgcggcctgaaatgctcctccacgaacccctctctcatccaacctactcctgccaccactgagctcccacagggcacactgaatgctgggaaggccactccctacctagcatgactgctgtgttcacggataagccgccagtaggaaaccatgactctgtgggtctggggtgggccctaggattctgtttttacccctcttcccaggtgattaggagccagacctggatgccctagttttgttcccttcaccaagtaccttctccccagagctggtttttctcctttgcaaaatagctggctacagagattcaaggacagcatgttggtaaaccacccagctgggcctctggcacaccgcaagcacccaatggcacctactgttaccctatgtgggttatttcctcaccccaggaggagctgggaggtgaagacctgcccaagggcatgtgaatggggaatgctgtgcccagggcagcaagtgaggtgacgtcccacccccagggtgtgttggaggtaaaatcccggggagccactgaagggggaggtaaagtgggaggtgaaggggcccacagggaggctggaggggagtggcaagccccgagtctgaccttcagcgtcagcagcagctggacggcattggtgaagggcgtgggagtgggcaggcccaggaggctgagggctcggaagaacaggagataggagaaagtccaggccagagccagggcgtggcaggagctgggcaaaagcaggaggcgcactgtgttgggcacagaagtctcggccttggccactcactccacgagtccagccaccaatcctcccccagctctccccattcgtttagagacagaaacacagaagggcagagaggacaggagggtggatgtagggaccgaatgagtatgattgaaacagtgggagaagaggctcagccacatagaaacacacaccaacagagaatgaggttaagagaagcttcgggtgaagaccctgcaatcctccactttttctttatttccgaggtccagggctcaagaagagagaggtggatatgaatgaatatgaacggtggccaggccagcagacacactgtccacctctctccatgacatggatgtagcggactgggacaaacacacagggaccagacgcagaaggcaggggagaaagaaaagcagatgaaggccggatgcggtggctcacgcctgtaatcccagcactttggaaggctgaggtgggcagatcacaaggtcaggagttcgagatcagcctgaccaacatggagaaaccccagctctattaaaaattcaagattagccaggcatggtggagcatgcctgtaatcccagctacttgggaggctgaggcaagagaatcgcttgaacccgggaggtggaggttgcagtgagccaagatcgtgccactgaactgcagcctgggcaacaggagcgaaactccatctcagaaagaaagaaagaaagaaagaaagaaagaaagaaagaaagaaagaaagaaagacaaacaaacaaacatgaaacagagaaatgagctgatcaacaagagacagctagacatgaggcagaagctgaaaaagactcaaagaggaaacaggttgcttccccctctcccctcctctccctctcctccctccaccaaattctcaccagggctgggcctgaatgagggcccaggtcccgaggatggtgaccagagaatgcaaagtgtgggggccacaggtgaacagggtgagccccaggcccacagcggctgctccccatctcttcagcccaggacctgcagggggaagggacagcataagcctggaaccttccagagggtcccccccctttattttccactggggagggagcctgactcaccggctttcttaaagaggaagccgatggggatggagataagaagaaccactagatacgtccattcttcaggcgacatggtctgggggaggggcagagattcacagtgagaacccaggaatccaggccccctgcctcctccctcttcgaggatccaggaacccagccttctagaccccagtttttgaggatgatggagtatgagcctcagctcctctcctttgagaacctagcaacccagactccagccccttcctccttggaggagacaggaatccacccccagcccctcctttgagcgcacaggcctccagctctcctgtccttggagaacccaggaaagtgtggggatctcccagcacccaagcccctcctttgcgaacgcagaaatcaaagctactccccgcacccatactggggacccagatttgaagacgcccctcttttaaaaacccagaaacggcacccctcccggacccttcctcttcgacagcccaggaatctagacctccgagccccctcttccagcgaggatccaggaacccagaccccctctttggatcccccatcccccggcccttgtgaaaccagatatccggaccccccagcccttctccttcgagaccacccagaggagcccgggtctccaacctgcacctccttcggagctccacacccctctcctactgagaacccggggatcgaacaccctcccctccccaggcccaggcccaggcccagccccaacccgtcccgcgcaccccagcgcatccccggcagagccacaggcggttgcgccagccccgagttccaacgcgcctccggggccgccccgcacccgccagcccgcagagaccctgccgccgtgtaacctcgcctcgccactgggcgccgccaccctggcccacctgagctgctcgccgggcaggaggcggccgagcagtcccagcccgcttgccgccgcagctccggccacgcctcccccgcccagcgcgcccccgcgccgcctgctccttctgggcgcccgccgggctgcgcagatcaggccggggaagaagccacggtcagggccccgggcgggcagggaagaagccccggagcagaagccgagagcgcgagtcggcaacgggattcgagtccaggtccacactgggatccgagctccgagtacgtgaaggggcgggccttcgggctcggaacaaggaggagccaaaagctttggacccgaaggggaacagacgggctctggaaaggaggcggggtctggagctcggcgtgaggaatgaggcggggtctcccttcgggttccttcgggcacaatcgggagcttgagttctccggaagcggggccacaaacttcggctcacttcggcaatagtcgagaacggagagctgaggccactgtgggcggagccacatgtttcggctttcttcggaggtagtcgagtccttagggtcactgttccgatgtgggcggggccacagactcggccggatgtgggtggggccacaagcttcggtttacttcgtagatagttgggtacaagtgacgctaggatgataggcggagtcaacaggttcgccagacacccatgagtatttacaagggggcggggcgaaagcgacttgccctcaaaggggcggaaccccgagggccggcgtgcgcctacgggaccgggccaggatgacgatcctcaagttcccaagtagaggagaggaagcggcagagggaggtgcgctcagtggggcggagccaaggtggcccccgcgggaggagggcggggcttcggtcctgcgaggggcgggacctgacttcccgcggcgctgatggggcgggatgacgaagttgacgagggtgtcggcatgagggggtggagcaaggagcgcgtggcgcggtgcgcagtgggtggctccacctcgactgcgaattactgtttatgaggtgactcgctggttctatcggtggacagtgggacattctgaagggaggcaaggaggcggactgagcgctcccaattggggtgagcccgcccgagcggagagtggacggcgggtgtccagggggcggggctttcggctgtggggttcggtcgtagggcgggaactccccaactggggtgcgctggcgctcggagggggcggggccacaggccgcgaggctgccgggagccgatgacgcccgaacgccgaacctattgcgtccgggaggaggcggggctacggattcggccgagccgagaacacccgaacgtcaaattgctggcgttcgagaagggggcggggctgcggattcggtggagccgaggacgcccgaacgccgaacttcctgtgctcgggagggggcagggttttgtactgtgggagtctgagagcgaggaggtccgaaagccgaatcacagtcgttcggaaagaggaggagcgaaggctcgagcgtccggaagagggtgtggcctcggcggtgccttagcctccagagcttctgaccgctgacgggaacacccgaagggggacgcccactttgcaagagggtggtgccaaaatggacctttgtaagggggcgtgtcgccgcgcttgcggaggtttgtttttcacgctccaaggcgcaatggtaggtacggcagtgcgggcacagagcgggtgccgaccgcagggtcacaagggtagagcgggaccctgggggcttggcgaggggagagggtcgggggcttgtctccggcgtctcgtctccggcggccgcgaggcctggtgggatcgcccgggggcggggcctggcgctcgggcccagcaggtggtgaacggcggctgagcgaggccccgccccctgaggcctaggggcggggcttcgccgagaccccggaggctttgggtgcgctgcagcggtccgcggcgcgcagctgtttcggtaactgctttgcctcccggctcccgcaggaggatgctggtggtggaggtggcgaacggccgctccctggtgtggggagccgaggcggtgcaggccctccgggagcgcctgggtgtggggggccgcacggtaggcgccctgccccgcgggccccgccagaactcgcgcctgggcctcccgctgctgctgatgcccgaagaggcgcggctcttggccgagatcggcgccgtgactctggtcagcgccccgcgtccagactctcggcaccacagcctggtaagggggcggggctcgaactcgggttcggtgggagcgggacctgggagtcaagtttcctggcttctgaagggaccataagcttggaggttccagcgaagtgtgcttctcaggccctgacatccttcaagcgccagcaagaggagagcttccaggagcagagcgccttggcagctgaggcccgggagacccgtcgtcaggagctcctggagaagattacggagggccaggctgctaagaagcagaaactagaacaggcttcaggggccagctcaagccaggaggccggctcgagccaggctgccaaagaggatgagaccagtgatggccaggcttcgggagagcaggaggaagctggtgagcatgggaggtggagtccagggaccacgggaaggagaggagagatcttttaggaattttagctgggaatccagtgcctgggtctccctgagggtgagaagactttaccccttgaatttaccaaactcttctctgtactccccaccaggcccctcgtcttcccaagcaggaccctcaaatggggtagcccccttgcccagatctgctctccttgtccagctggccactgccaggcctcgaccggtcaaggccaggcccctggactggcgtgtccagtctaaagactggccccacgccggccgccctgcccacgagctgcgctacagtatctacagagacctgtgggagcgaggcttcttcctcagtgcggctggcaagttcggaggtgacttcctggtctatcctggtgagtatgggttggggcctctggttgctgtgcctttccatacgatcccaatgtattctgcgtttttctttttttttttttttgtcttaatagaggtggggtctcttgttgcttaggctggtccctattcctgggctcaagcaatccttccacctcggccccccaaagtgctggaattataggcccagctgcatttttcttttttgtctcactttctcttagcctctgaaattcatagacagacaggaaacatttgggagctcccgaactcattgggcaagcagtttaacgacttttattaaatgattactgtgatccagaagattcacttagaagtagttagacatcaggctgggcgcaatggctcacgcctgtaatcccaacactttgggaggccaagacaggtggatcacctgaggtcaggagtttgataccagtctggccaacatggtgaaaccccatctctactaaaaatactaaaactaactgggcgtggtggtgggtgcctgtatttccagctactcgggaggctgaagcaggagaatcatgtgaacccagggggcagaggttgtagtgagccaagatcgtgccattgcactccagcctgggggacaagagcgagactttgtctcaaaaaaaaaaaaaaagcctagaagtggaatagttgtgtccaagagcatctgttttagagtatctatagtgatggctgaaatgatctcagatctcctcccagtggtcgttcccgtggcgtccagccgtctgccattggtcactgcttcagtgcctctctccttcccccaggtgaccccctccgcttccacgcccattatatcgctcagtgctgggcccctgaggacaccatcccactccaagacctggttgctgctgggcgccttggaaccagcgtcagaaagaccctgctcctctgttctccgcagcctgatggtaaggtggtctacacctccctgcaatgggccagcctgcagtgaactccagagacctaggggatgtggctgtgtcggcagcaagagcctttctggatgttccccagctcttctctgggagtctagaacatcctcctacctttctccgcggttagtttttgattccaggttttcgaacactacatcttttttatgttcttccttgtttcaaagcacttattggctgtgtttttgtagttacctattttcacactgtgagcttcccgagaatggggcctgggtttgattcatctgttttctacagggtttaagtctcaggaggtctcaataaacttggtatataaatgttcatgatttgaatgtttgcgacagtcctggaacccgtggatggtctcatctgcatgtacaggtgagaaaaaggcctggaggagggggactgacttgcccaaagtcacacacttagtaaatagcaggcctggcctttcaaaattggtttttctgactcctaaatctgcactctttctacctcactaaacttccttttgaaaagatttctatgaaatttcccagatgcatacaaacgttataaataaaaatataggctgggcacgatgacccacacctgtaatcccacagaacttttggaggccaaggcagggggatcgcttgagcccaggagtttgagaccagctctggcaacattgtaatacccagtctctacaaaaaataatttaaaaaaaaattagccagggatcccttgagcctgggaagttgaggctgctgtgagctgtgattgcaccactgccctccagcctgggagacagagcaagaacctgtctcaaaaaatatatatatgtgtgtgtgtatatatgtaaatatacacacatgtatgtatatatatgtgtgtgtatatatatatatattatgaaaggaaatgagtattgtaattttaggagttcagagcctggggagaaaggaaggactctggaaggcgttctgctttttcatggcctgggtagtggtgaatttttttgatactgtatatttatattttagactcttttttggatgtgttatattctgcaatttttataaaagctaaaacacatgtatttgtaaaaaatttgcacttatgaaatcatttacccatgtttttgcttaagaaagtactagaacactaccactattccaataattacacctttatcttatcaatgtgcagttttattttgtcacgtttattttgtcagtgtaatacattcacatggtgagtctgggcgtggtggcttatgcttgtaatcccagcactttgggagaccaaggcgggcggatcatgaggtcaggagttccagagcatcctggccaacatggcccgcctctatgaaaaatacaaaaattagccgggcgtggtggcgggcgcctgtaatcctagctactccggaggctgaggcaggagaatcacttgaatctgggaggtggaggttgcagtgagccaaggtcacgccactgcactccagtctgggcgacagagctagacactgtctcaaaaaaacaaaaacaaacaaaaacttccacatggtaaaattctggggctgaaagtctccacctctagttcttccatttcttccccccatgtttcattctttctcttttttgtgtgaattgagcagcctctggaaccagaataggtttagagagactcccatctcccctctttcttgccattcccagtaaacagacttcatagaatctcaatttcctgtaagtttagattaatttaaaatatgacactgggccaggtgtggtggctcacacctgtaatcccagcactttgggaggctgaggtgggcagatgagtttgagatcagcctggccaatatggtgaaaccccatctctactaaaaatacaaaaaaaaaaattagccgggcgtggtggcatgcgcctgtactcctagctactcaggagcctaaggcaggagaatcacttgaatccgggaggcagaggttgcagtgagccaagatcgcactactacactccagcctgggcaacaagagctaaactccatctcaaaaaaatgaaaagaaaaaaaatgacgctaacccctgtctggccaatactctctttgtgcctgcttcataattggctttgtaagtctattctccaccctttctcctctctacaacaaagtacttagaagtctcattccctctgtcatgagtctctcctctgaaaagttcctcatttaaaactcctgtggccagatgtggtggctcagacctgtaatcctagcactttgggaggccaaggtgggaagatcagttgagccgctgagctcaggagtttgagaccagccttggctgaacatagtgagacctcatctcatctctatttaaaacaaacaaacaaaaaaaaacttttgtgactggtgtccccccatgttgtcagtcaacaaattctataggtgccatgttcaaagcactgtggatccacagttaggccccaccctccaccttcactgccagtatcttagaaaaaccaaaccatggctcatttgatattgatagcttcctaactcatcccctgccttccattcttgcccctctgttgtctgttttcaacagagcagccagaatcatcgttttttttttgtttttttgtttttttttttttttgaggcggagtctcgctgtcgcccaggctggagtgcagtggcgcgatctctgctcactgcaagctccgcctcccaggttcacgccattctcctgcctcagcctccctagtagccgggactacaggcgcccgccacctcacctggctaattttttgtatttttagtagagacggggtttcaccatgttagccaggatggtctcgatctcctgaccttgtgatccacccgcctcggcctcccaaagtgctggggttacaggcgtgagccaccgcgcccggccagaatcatcatattaaaagataagtcagaccatgtcacagctctgtctaaaactttcctggagttttccatctcagagtaaaactcaaaggtcctactttgcagcttcctcatgaactggccatgtgcattctcttccttgcttattattattattattatttattttttttatttttgagacagagtcttgctctgttgcccaggctggagtgcagtggcacaatctcggcccactgcagcctctgcctcctgggttcaagtgggttcaagcgattctcccacctcagcctcccaagtacctgggattacaggcgcctgccaccacgtcaggctaattttttgtattttagtagagacagggtttcaccataattgcccaggctcgaactcctgagctcaggcaatccgcccacctcagcctcccaaagtgctaggattatagacatgagccaccgtgcccggccagctttgttcctctttactgctggatattccattgtatggacataaccccattttatttatccattcatcaggtgattggcatttgtttctagttaaggacaaggttttggttttggtttttcttttatttacccttgttcatgcagtatccccaggtccaagaacagttcctggcacacagcagtcaatacattgttgctaaataaatgagtggcttaaactataatttttaaatcagggctgagacaatttggaaattataatttctcctacatgactttctaagcatattttaaataaatatacatacgttaaggtcatttttattaatgaaaattgtagcatactatgcacacttctgcatcttgcttattggatatgcccaggcttgtctcatttttgccaacagctacatggttttgcgtcctatggatggggcataattagattttattacacttgtacaaaaggaaaggaattcagctccccaagcatgcccagctggtccttggcaacccatgatggaaaccaagggttcctcttatattacccgtgctcctttcagagaggaagggctagagggctccagcctgagtgagagagagagaggaggaagcatgaggggtttgtggaagagggcctggtgccatatgactggaccatgcttctgaagaggatcagggtgaggccagatctcatcagttgacccttgagcaacatgggtctgaactgctcgggtccacttttatgcagattgaaaaaagtaaaggttacacagagcatgcctgcctctcctgctttgccttttacctcctccacctctggcaccctgagacagcaagaccaaaccctcctcttctttctgcacctctgcctactcagaatgaagacaaggatgaagacctttatgatgatccacttccacttaatgaatagtaaatatattttctcttttttagaattttcttaatattttctttttttttttttttgagacgaagtctcgctctgtcacccaagctggagtgcagtggcgcgatcttagctcactgcaagctccgcctcccgggttcacgccattctcctgcctcagcctccccggtagctgggactacaggtgcctgccaccacgcccggctaattttttgtatttttagtagagatggggtttcaccgtgttagccaggatggtctcgatctcctgacctggtgatccgcccgccttagcctcccaaagtgctggggtaacaggcatgagccatcacgcccggccaatattttcttttctctagcttaattcatcataggaatacagaatataatacatatagcatataaaatatgtgttaattgactatgttattggtaaggcttccagtcaactacgagtaatgttttttttaaatcctgagacagtgtcttgctctgccagctgggctggggtgcaggggcatgatcttagttcgctgctgcctcaacctccttgactcaagcagtcctcccaccacagcctcccaagtagctggaactacgggcacacaccaccacacccagttaatttttctgttttctgtagagtctgggttttgccgtgttgcccaggctggtcttgaactcctgggctcaagtgctctgcccacctcagcttcccaaatcccacctggggttacaggtgtgagccacggtgcctggcctagtagttaagttttggggaagtcaaaagttatatgcagattttctttcttgatttttttttttttttttgaggcagtcttgctctgtcgcccaggatggagtgcagtggtgcgatctcggctcactgcaatctccacgtcctgggttcaagtgatgctcttgcctcaacctcctaagtagctgggattacaggcacctgccaccacgcctgcctaatttttgtatttttagtagagaccaggttttgtcatgttggccaggctggtctcgaactcctgacctcagttgatccgccggccttggccttccacatagtgctgggattacaggcgtgaggcaccgcgcccagcctatatggaggttttcggctgagctgggggtcagtgcccctcgcccccagactgtacagagtcagctgtgttaagatattaagcaccttcagtacacaagactctgtgctggttttcttttcttttttttttttttttactctaaatcatcaaaccctatgaggaaagtcctgttactttctcccatttagcactcttgaagaggctaatttgcctaagatcaagagctcgtcagtgactgctgaggttcaaacgcagatcttttttaagacttgagaacctacaggttcaaccaccattataaaaccatctctgtaatcacgaggcacccggaatttgtggagcttggacttcatcctgaagggagtgaaaacttatggaagttttttccttccacgtttcccccttccagatgaataatatacgcgtgttcaagatacaaaaatgcataaaatttggccaggcatggtggcttacacctgtaatcccagcacttggggaggctgaggcgagtggatcacttgagcccaggagttcaagaccagcctgggcaatatggcaaaaccccgtctcaaaacaacaaaacaaacaaacaaaaaacccataaaactgaacaaggtagtttgtaagatatggaagtacaatgcagatgacaataatgacgatggtagctaccactaggcgctttatttatgccactctcctcaacactggatagactctcacttaatcctcacaagcttatgaggtaggcgctaccatcattcgccgttttacagaggaggacgctgaggcacagagtgattgagaaacttgtcgaaggcactgcagctggcaagtggtgacgtggcatttgaatccaggcatccggatggtgtggatgccgtggaagagaaaggggcgggtgggactgcttcctgaggagatagtgactgccgaggcagcagcgtagggaagacaactgaagaacacgagctgtggagacagaccatcgcattcggagtggagagatgggtgtacagacagacaataaccagactatatataaaaagagaactctaggtcaggcgcggtggctcacacctgtaatcttagcactttgggaggctgaggcgggtggatcacttgaggtcaggcgttggagaccaggagttcaaaaccccgtctctactaaaaatttaaaaattagccgggcatggtggtgggcgcctgtagtcccagcttctcgggaggctgaggcacgagaatcgattgaacccgggaagcggaggttgcagtgagccgagatcgcaccactgcactccagcctgggtgacgagagcgaaaaactccgtctcaaaaataaaataaattactgataatagtactaataccccttaagtggctattgataataatagtaccatgggtgggggggcaacttctctgagagtgctctgtaagtatgtattgaagattgagtaaatacatttaaaattcttagaacagtatgtggcacatagcgttccagaatgccacattattgttagtgacagaaataatctcggctgggcgcggtggctcacgcctgtaatcccagcactttgggggggccacggcgggaggctctctcgaggccgggagttcaagaccagcctgggcaacatggcaagacgccgactgttaaaaaaaaaaaatgctacccgggcgtcgtggcgtgtgcctgtaatcccagctactggggaggaggtgggaggatcgctcgagcccgagaggttggtcggggcctcagtgagccgaaatcacgccactgcactccagcctgggcgacggagcgagaccctgtctcagaaagaaaaagaaaaaccaccgtccaggggcggagaaggaaggttctccctacttctcaggtttccactccctggccggaaaaaacctagtcctcccaggttagcacgccgctctagcccagcctcacgtctccactgcttctcagccagccaacgcctcttctgattggctctgacgtgcgtggtgcgtgaaaacgtcacgagacgccggcgttactataagagcgcagccgtggcgcttccgcgcctctttctcagtgaccgggtggtttgcttaggtgaggtgcggtggtgtgctttttctctagggtttgggttggatggtggcccgggccttccgagtttccatgagtaagctaaagacgttaggaaacagagcagggtggttgaacgggagtgcagcacggttgtgggggcagatactgactatgagagcgttggaggttattctcgcgagatcggatctgggctccgcgaggttttggcgtagttgtgggactgcgcaggcgccgtttggatcccttacgctcacacttctctcccgcgcaggcgcagacggggaagcggagccaacatgccagtggcccggagctgggtttgtcgcaaaacttatgtgaccccgcggagacccttcgagaaatctcgtctcgaccaagagctgaagctgatcggtgagtggccaaggcttccgggaagtggttcggcttccgggaggcggttagcacgtggatgaaggtgcccatgtactctatctagtccgtcccctaaatttggtactattcgtggtttaggaaggttttgtgattccaaagctgccagtctagttgttgtgccagtacgtgggactacacttgtccacccccttctccccaccaggcgagtatgggctccggaacaaacgtgaggtctggagggtcaaatttaccctggccaagatccgcaaggccgcccgggaactgctgacgcttgatgagaaggacccacggcgtctgttcgaaggtgcgtatgggagtccacagcagagggatggggtgcagggcttgtgaggttcattctcccttctgttgcctctgttccagtgatgagagttgtgtcattggataaatggaaccagccttctaacttttagtggcacttgtggagtaggaaaagtgtatctggatcagtctttgccctgtttcttaggtgtgtggcttttttgcccagttattggaccttcagtttagtaatgaccagagctaaagataggcctggcacacctgggcacccgtctatatctttatattctgtttatgtggcctgtttgctagtggatgagagtagactatgaagtggaatttctgggctaagtgatggtgataacagggtttgcacatttgcttggtttattgtttttttaattaagttttctcgttttatttagtcttttgagacggagtcttgctctgttgcccaggctggagtgccgtggcgccatttcggcttactgcaacccccgcctcctgggttcaaacaattctcctatcttagcctcccaagtagctgggactacagacaggcgcacgccaccacacctggctaattttacttttgagacggagtctcgctccattgcccatgctggagtgtagttgtcgcaatcttggctcactgcaaactccgcctccagagttcaagcgattctcctgtcttagcctcctaagtagctggaatcacaggcatgggccaccaagcctggctaattttctattattagtggagatgggttttcaccatgttgtccaggctggtgcttgtttttttaagctggtcaaggacatttaggtggtatttagcaaaggcctgaacaggagagaacctgtaaaatgtctcagggaacagcatttcaggtgatgactttaggagggcatgcagatcacatagacttaggcttactttactaattgtggtgaaatacacattaaattgaaaatgtaccatcttaaccatcttgttttaaaatctactctgagatgcggtgttattggagtgctttctacagcagattggcatgaccaagattggcatttgtatatcctgagacgctgcttttgcctgagtttgggtagtcatgatttatggtgaaaagcagtctctacacctgagccctgactgttaggcatgagagtggtcatccatgttaggcgttgagaaagtcctggcgcatgtttagctacagattatcacagtttgtcccaggcttgcagatgttagaagctttttctttaaataggcacaggatcttgcagtgttgaccaggatggtttccaactcctaacctcaagtgatccatccacctcagctttccaaagtgctggggttacaggtgtaagccaccgcacctgaccctttcattcttttcgtcaatttgtagaccccgttgataatctcatgaaagtgctggagatccctcccccatagatactgatgctgggtgggaattcatcccagggttctgtggggagtgggctatagctggttctggttttagggaggactttctggacatagatcctaattgcaatgaaacttacagtcatgtgagaaagcggtgcaggtgtctgagggttatttgtggttttccaaggcagaagtgaaaattcccaaggggtacacagttgttcaggtgagtacactttctagtaaatgaagccatctagcctagtcagggacaggaaggaggagcttggatgtttgctctttggtgtaatcctgccttgattcagatcctgcctttcccactaagatgtgtgactagcgagattctgagtctcgtctgttaagactgaacagccgccaacatttggctggcagttaataatcaacagatagaggccaggcgtggtggctcatgcctgtaatcccagcactttgggagaccgaggtggtcggatcacttgaggtcaggagacctcaagtcagagaccagcctggccaacgtggtgaaattccatctctacgaaaaatacaaaaattagccgagcatggtggtgtgcctataatcccagctactcgggaggctgaggcaggagaattgattgaacctgggagacagagactgcagtgagccgagatccgcggcactgcactgggtgacagcgagacacaaaacaacacgaactccccccccaccccccagcacaactgtgaagaaatgtaggagtcatgtccatttttcagatcagaaatgaaggcattgtaatacctaactgccttgtatgatgacaaggacctgtttcccactgaggtcctccctggtttgcatttttaaagcattttaaattctcttggtgcattggcccagtggagcctcagcagtaggacatgcttttgttgaaggtgtaaggtttattgtgctgttgaaaactattgtcttcatacttaaaggttttgcctgtggctgactctcctgttctttttcaggagatagatggttcaataaatgtgggcctgagtgcagtggctcatgcctgtaatcccagcactttgggaggcagaggcaggcggatcacccgaggtcgggagtttgagactagcctgaccaaagtggagaaaccccttagtctctactgaaaaaatacaaaattagcggggcgtggtggcgcatgcctttaatcccaggctgaggcaggagaatcccaggaggcggagtttgcagtgagccgagatcacgccattgcactccagcctgggcaacgagagcgaaactctgtctcaaaaatgataataaatgtgaaacatttttttaaaatcatgcctttgttttgcctaatggtgacgatctcactttgtctcccgggctggagcacagtggcatggtcgtggctcactgcagcctggacctcctgtgcttaagtgatcctcctcagctctagtagctgggaccacaatccaccatgtaccaccatgcccggctaatttagttttacttttttgtttgttttggtacaaatgcggtctcactgtgttgccgaggctagtttcaaacttctggactcaactgatcctcctgcctcagcctcccaaaatattgggtttataggccaggcataagggactgtgcgtggcttaagtttccattttctaatgtaaagacaaaaaggcgtgaagtgtccaaagaggtaaatggtcccaaactcattttcattgccttttggacatgtttttgtattttgatattcaggtgtttaaatatcctctgatgttgagttaaaaaagaacaaaaattgaagccatagtatgacataggatgctggaaatgcacacagctggtgtttccattttgattctccctacctgtaactgctccctactgggaaaactttgggtcctcacaaagtgagctagctttctttcaaactttgcttggagggtaacagtgccaggaatatcagaagtgcctgatgcatgtagatctatttatgaaagcttgcttgaatggtttgctgtaactagtaagagccactttttataaaagtgcacataaggaaaaaaggttgaggtgtttaccccagtcaaggggcagttgatttgctgaaggcgtgtgggattatagcagtgagcgggagcctaggggatggcgtttgcccccagggccctggggctgtgggcaagggcagtccagagtattagctagaagccatggctttggacagggtaaggagcaagccgtcctgagcctggggttggaagaaaggtgtagtagggcatctgttggatattttatgcagtgcattgttaggttatatacatactagatatatttttggtggaaaattttgtacagaatagtaaaatgaatgacatgtacctagctggaaaaattctagtgttagaaattacttttctctccttaaaagatgtagatactgctatttatggcacggaatgtgattcaatctcacatctgcttaatcagaagagctgtctgggctgaggatatgaactcttcagcactgtgctttgttacggtggtagtagcttaatagcagctgcatttggtcttttgcagactgagtccttgtaaggaggtgatttcctttactcttgctaagaatgtggagcgagggatgtatgctctcagatgaggaggcaggtgtattttgccctcctgtcatctgcagtttactatgaatgatgacctgacaaccatagggtagtttggttttttgtattgttttgttttgtgacagggcctcactctgtcgcccaggctggagtgcagtggccccatctcaggtcactgcaacctccgcctcctgggttcaagcagttttccttcctcagcctcctgaatagctgggattacaggcagtgcgccaacggcctggctaatttttcgtaatcttagtggagacgggctttcgccatgttggccgggctggtctctcaaactcctgacctcaagtgatccgtctcggactcccaaagtgctgggattacaggtgtgagccaccactcccagcccgtagggtggttttgacagtgacatgggtcacggtgatggcgctgtactacttgtgcctcaccgccgcggcatggagctaccaagaggcggagccaggatttgaacccaagaagcctgaggtcagaaggcggaatcagtgtttcctcccactcttcccaggcaacgccctgctgcggcggctggtccgcattggggtgctggatgagggcaagatgaagctggattacatcctgggcctgaagatagaggatttcttagagagacgcctgcagacccaggtcttcaagctgggcttggccaagtccatccaccacgctcgcgtgctgatccgccagcgccatatcaggtaccacctcggatgggcacctgaatcttcctccacctgcccctctgatggttgccctcactaagcctgctgtccctatctcctatgcagccctcggaggtgatgggtgtgaactcacccagagggtacagattcacccttgcacacagctcaccagggagctggggcagcctcttgccccaatagcccagcgcaagggtcactgcggctctagccgtacaccttgtgaaggcctctgccaggcatgtgggcagctggacaggtaacagctcttggtgtccccagtggagggagagaaccagcctcacctcgcttgggtggtgggttcagctgtctcctggcccgcttgtgaagttgattccagaccccgatccatgactgcgttctgggtactcagtgtgccctttctgtaatgtggcaccattgagggggaggagctgtacagaaagagggcaagatgtttgcgtttagaatcttcgccccagcccttcactaaccctgtgagccgtaggcagagccttgtgtgtcaatgctttcgtcggagacgtagcctcgggttgctgtgttattgtgggcattgctgctgcacgtggtaatacagctcagtgtcaggtgtggggttcacgatatttcagactcggaacttgggggctctcacatggccatctcatttgctttgtggtcttaggtgggatactttcggatttctcctataaaatggggttgagaaagtcatctgaagcatttttggggattaaggtgataccctaaaaccccggagggcgcacgtaggatcaggtgcacccttcctgcagcgccttggtgtctgcagccgtggcggcctcacggggtgggtggagaggaaagagtggtgcggtagctggggttagcgtccgtttctcctccagtccacctcaccttgtcgctgcttccagggtccgcaagcaggtggtgaacatcccgtccttcattgtccgcctggattcccagaagcacatcgacttctctctgcgctctccctacgggggtggccgcccgggccgcgtgaagaggaagaatgccaagaagggccagggtggggctggggctggagacgacgaggaggaggattaagtccacctgtccctcctgggctgctggattgtctcgttttcctgccaaataaacaggatcagcgctttacaattggtgtgtgggggtctctcatccttgactctttcccctgctctaaacatgcagccttccctgggaggctcactcacttgggagtgcctaccagctagtggtccctggcctctcagtactattctacagtagtgaacacacatctttaccagaaacttctgtcatcaggggagagacgagtggtatttttggaaaaactgtgtcaaaaccagaaggaaattccaagtaagccggtgtttgcatataggggtgggagggagccggtcattgctaggcagggcaggcgccgagtggaggtgggggccttccctgcctgctggccctgggaccctgaccccgccaggcaagagacaggtgggacgggagctgaccagaggctgacgggttgctggggaaggtgaactgttggtgattgttggggaacacttcacagaatttgcttgctagtttcaaagcttgtgatgcagttgatgttgggcaagttcccagttttgtcttcacatgtaggggaagtgggttagcgtaggagaaggggcgttgagggaagtctgttcctcctctccgcgttcagtgcttctgtggactcacggtcaagaggttggcaggcttcccttttctcagccttgttgatcatctgtgttgggaaggggtttggtttctgaggaagtgagaaacctgaaattgtgcaaccccctcaggctgcaggctgtagttgattgggtccttatctggaggccttcagggtttgaggtcagggcagggacagttctggaacacagctaagttactgtaaaccacgtggagaagtccattgcggcttactcaagctaggtggttggcccttccttccctcagcgttgctacttgggaaatgacggtggtcttgtgtccatggggccagctgctgcaccatctgggctcactgtggtctccttccttggagcgtggggtctgggctagtggatggccggggcagcgtactcactgggctcctgggagctcccctgggaggaagagactgcagttgtctctggtctgagaggtggtggctcacctgggtgtagctcacaattgcggagctccacggcagcctggagggaggggagagtgggagttgaggtatgcggttctggggagaagcctacgggcttggaaaggaaaagggtcttcagggctctgtctacagaggcagcgagcggggcaacagagggagactccatctcaagaatttgtagagatggagtctcaatgtgttgccccggctgatctaaaacccttggcctcaagcaatccactcgcctcccaaagcgctaggatgacaggtgtgagccacagtgcctggcctgcgtgggtctgtttaatctccgggcctcttgctctccctttcttggtgatctccttggaccacatccctgtatcattctctctctcgaccctgagcccagggtccagagcagagaacgggatggggtctgggtaggggcccctcacttgcaaccaggatgttgggtgggggcgacgggggaccgaccttgggcaggaggcattgtgtccaccgcagcatctgtgctggcccccaggggggtggctcgcatggcccagggggacgtccaggaggtgctgcccatctaggcgctggcgggctgggagccccttgtcctggtcaatgcagagctgtcaaaaccggcctctgagtgatgctgaggggtcaggctgtctccagagagcaccggcgatcccggctgtgctgagagggagggctgagggctgcctggacgcccctgagatgaggcgactggtatttaggggatgcgtactctctggggcccgctggggcctgcagggagagctctcaccggtctcaactccatgccttctgccttgtgcttctggcccaagaggtcggggtcactgaccaccccgtgtccacctaaggcttccctggacacacagcagggagatgggcaatgagggtgggggttgtggccctgcctgtcacggtccccagcagtgcagatgaattagaccattgagccacagagcctggagggcagatgggtgtgctggtataaggagccccgggctctgtgttacaggtcatgtgttctcaccagtggccttgcaggaggggaacagccccttccccagggcctcgctctgctccccctgaaggatggggctgaggggacagcaggctctgggggcctttcagaccacatttgagtcaaaatttgacttccccatactctgcctgcttccacctcacccaactctcatccaggggtgacccttgttctagcacatgaggctgaggccagagagggcagggccttaggacacagcccagtcactgttctaattctagaggcaagccccttccatgtcctgagctctgtaatgcatcttttctttcatgagccttgcgatcaggcgatgtttattcagtggttaccacatccaggcatgctgccaggaggaggggagtcgtgggtgaagctgataggattcctgctggactcacagagcctgggttaatgacacattacccatgtttagataggaggtaattctgctccggtttcgacaagttgtaggaaaggaggaaaacatgctcatagcaggtgagcagcgtacacctgtcatgggagtgaggggtccttctgggggatggagagaccaagacgtgaacagtgagtgtggcacgcagagtgtcctccaccagaaacagtgtgggctgttctcagacctgagagtgagccaaaggaagctgggaccttgtcattcaggggacttgtgcaccgtgaagatttattggatgctatgtttaagaaaatggaaaatccggcccggcacggtggtttgcacctgtaatcccagcactttgggaggcggaggtgggtggattatgaggtcaggagttcgagaccagcctggccaacatggtgaaaccccgtctctactaaagacacaaaaaatcagccaggtgtggtggtggacgcctgtaatcccagctactcgggaggctgaggcaggagaatcacttgaacccgggaggtggaggttgcagtgagccgagatcgcgccacagcactccagcctaggtgacagagtgagactccatctcaaaaaaaaaaaaaaaaaaccggggaatctttagaaagcacagtggaaacagatgtctgtttttacaagcccatcactgcacagaatgcaatatgggagggtttcactaatggttaaccataaccacactccagcgtgagcccagccactaggcaatgtgctgataaggattctaagtggtttatgtggactcctcatgacctatgacacacatacgtttacagtggagtggaacgaggcaggagggcttctctttgtcatagtctaccagctctgcagaggtgtcagctacatccggattggctcagggagcggccgtcagaagacttacacgtgtttaataactgaggttgtgtgtgtgtggcagggggtgggtaactgtgatgagtttggtgtggcagagggggagccatagcctgtgaagctggaaagtgtatcaggtttggtcatcaacaggcttgaacatgaagtacaggaacgtgcatcttatttttggaagatggagccccgttgggggaatttgagcagtggagggtcacagccaggtaagatggtcagaagaggcctcggaagtgatgagagggatggactggagtagggatgggagccagtagggggccaggagggaggttggtgcagtgcacagacagggcgtcctcggtccccagctgagcttagactgtggggatggaccagcggacacgggtggagccgggtgaggagggatgtgggcagagaggtttggatttgttcactgtgtgtgaagcagaagagtgtgaggagcttttccactctctgccttggttgatgggaggaaccagtggggctgccgcaggacagacgacccgcgtgggagaaggaggctcggggagatgtttctaagacttaacttgctcacagagggaagcacaagcttccttcgagcctgggctttgttttcccaaacaggtcccttcactgactttcttttttgagacggagtctcgctctgtcgcccaggctggagtgcagtggcgcgatctcggctcactgcaagctccgcctcccgggttcacgccattctcctgcctcagcctcccgagtagctggggctacaggcgcccgccaccacgcccggctaatcttttgtatttttagtagagacggggtttcaccgtgctagccaggatggtctcgatctcctgacctcgtgatccacccgcctcggcctcccaaagtgctgggattacaggcgtgagccatcgcgcccagccaactttcctgttaatgagtagcactctttttttctttcttttctttccccctttttttttttttttagacatggtcttgctctgtttcccaggctggagtgcagtggcgtgacctcagctcactacaacctccacctcctgggttcaggtgattgtcctgcttcagcctcccaagtagctggattacaggcacgtgcaaccacgcctggctaatttttgtatttttagtagagacagagtttcaccatgttggccaggctattctcgaactcctgaccttaaatcatcctcttgccttggccccccaaagtgttaggattacaggcatgagccatcatgctcggcctcttttttctttttctttttttttttttttgtttttgagacagagtcttgctctgtcacccaggctggagtgcagtggcgtgatctcagctcactgcagcctccacctcccaggtgccagcgattctcctgcctcaatctcccagttagctgggattacagatgcgcgccaccatatccagctaaattttgtattttttagtaaagacagagttttaccatgttggccaggctggtcttgaactcctgacctcaggtgatccgcccgcttcagcctcccaaagtgttgggattacgggcatgagccaccatgctcggcctcttttttctttgcttaaaagatgaggcctgttgcccaggctggagtgcagtggcactatcatagctcactgcagccttgacatcgtggctcaggtgatcctcccacctcaggctcccgagtggctgggactacagacgtgcacctccacagccactacttatttttgtagcgatgtctatcagctggtgaatagagaaagtgtggtatatccttacaacaaaatattattcaaccgtagaaaggaatgaagtactcatacatgctacatgtgtgaaccttgataatatactagataaaagcagtcaggaaaaaaaggtcacatatgacgttatttcatttataagaagtatccagcctgggtgtggtggctcattgcctgtaatccagcactttgggaggccaaggcaggtggattgcctgagtttaggagtttgagaccagcctgggcaacatggtgaaataccatctctaccaaaaatacaaaaaattcacccggcatggtggcatgtgcctgtgatcccagctacttgggaggctcaggtggcaggatcgcttgagcctgggaggcagaggttacagtgagccgagatcacaccactgcactccaacctgggtgacagagtgagtccctgtctcaaaaaaaaaaaaaaaaggtattcaaagaaggccaatcgatagaggcagaaagtaggttaattgttgcatgggattaggtgggagtgattgcttgatgtaaactcggtttccttctcggtatgataaaaatgtttcggaatgagatagaggtgatgcttacaccatattgtgaatttactaaatgccacaaaatagagttgtatctcaataaaaatatatttgttgggccgggtgcggtggctcacgcctataatcccagcactttgggaggcaggcagatcaagaggtcaggagttcaagaccagcctggcaaaaccctgtctctactaaaaatataaaacttagccaggcgtggtggcatgtgtctgtaatcccagctactcgggaggctgaggtagaatggagcgagactccgtctcaaaaaaatatatatatatatgtaaatatatatatgttgggcatagtggtgcacacatgtagtcccagctacttgggaggctgaggcaggagaaccacttgaacctgggaagcggaggttgcagtgagccgagactgcaccattgcactcctgcctgggcaaaaagagtgaaactccatctcgaaaaaaaaaaaaaccacacacacacacgtagataaaatcaaatattctgtattccataaatatgtacaattattatttttcaattaaaaactcttaagctgggcacagtggctcatgcctgtaatcccaacactttgggaggcggagatgggaggctcttgagcccacaagtttgaggccagtttgggcaacatcgtgagatcccattgctacaaaaaaatttaaaatatatttttaaaaaactctaatacagtagtccccctttatctgtaattttctttctgtgttttcagttacctggtggtcaaccatggtccaaaaatattaaatagaaaagttaaggaatcataagttttttttttttttttttattgatcattcttgggtgtttctcgcagagggggatttggcagggtcataggacaacggtggagggaaggtcagcagataaacaagtgaacaaaggtctctggttttcctaggcagaggaccctgcagccttccgcagtgtttgtgtcactgggtacttgagattagggagtggtgatgactcttaacgagcatgctgccttcaagcatctgttcaacaaagcacatcttgcaccgcccttaatccatttaaccctgagtggacacagcacatgtttcagagagcacagggttgggggtaaggtcacagatcaacaggatcccaaggcagaagaatttttcttagtacagaacaaaatgaaaagtctcccatgtctacctctttctacacagacaccgcaaccatccgatttctcaatcttttccccacctttcccccctttctattccacaaaaccgccattgtcatcatggcccgttctcaatgagctgttgggtacacctcccagacggggtggcggccgggcagaggggctcctcacttcccagtaggggcggccgggcagaggcgcccctcacctcccggatggggcggctggcctggcggggggctgacccccccacctccctcccggacggggcggctggccgggcgaggggggaatcataagtttttaacaaatcaaaatatttctaaaaacctagagtaggcaggaaaggggaaacaacacacagcagaggagacaaacaaaaaggcacacctgaacacagtcatgcaccgcataacgatgtttcgctccactacacatttcatatgtgatggtatagcctatgtatgtagtaggttataccacgtaggtttgtgtaagtagactctatgatgttcacacgacggtgaatttttttttttcttttttttgagatggagtctcattctgtctcccaggctggagtgaaatggcacgattttggctcactgcaacctccgcctcccaggttcaagcgattctcctgcctcagcttcccaagtagctgggattacaggcatgcaccacgatgcccggctaatttttgtatttttagtagagacagggtttcaccatgttgagcaggctggtctcgaattcccgacctctggtgatccacccatcttggcctcccaaagttctgggattacaggcgtgagccaccacgcctggccaaaattttttaatgatggctttctcagaacatatccctgtcattaagtgacatacggttgtaatgtcatcagtgattacattaaatataagtgatcaaaaagagattacaagattggaattttttttttttgagacagagtcttgctctgttgcccaggctgtagtgcagtggtgtgatctcggttcactgcaaccactgcctcctgggttcaagcagttctctgcctcagcctccctagtagctgggattacaggtgcctgccaccacacctggccagtttttgtatttttagtagagatggggtttcaccatcttggccaggctagtcttgaactcctgaccttgtgatccacccgccttggcctcccaaagtgctgggattacaggcatgaacccccgtgcctggcctgttgtttatattttatcacattaaaaaagcagaaggatgaaaaatgtattatgcaaacactaatcaacagataatttcaccggcttgttagttgttttgtttttttgagacagggtctcgtccaggctgaagtgctgtggtgcgatctcggctcattgcagcctcgacctcctgtacccaagtgatcctcccacctcagcctctcaagtagctgggactacaggtgtgtgccaccacgccggactggttttattttttgtagagatggggcctcacaatgctgatctgactgactcgaactcctgagctcaagctatcctccccacttgccctcccaaagtattgggattacaggtgtgagccactgcacctggttatgcttcttttttattttttttctttctttttttttttttttcgagacggaatctcactctgtcgcccaggctggagtgcagtggtgcgatctcagctcactgcaagctctgcctcccgggctcatgccattctcctgcctcagcctcctgagtagctgggactataggcactcgccaccacgcccggctaatttttttgtatttttagtagagacggggtttcaccgtgttagccaggatggtctcgatctcctgacctcatgatccgcccgcatcagcctcccaaagtgctgagattataggcgtgagccaccgcgcccggcctatttatgcttcttaattttcccatgtcataagttcgatgtataatatttacattatcattcagtttaaaacattcactgtttttttttttagagacaaggtctcgctctgtcacacaggctggagtgcagtggcacagtcatagctcactgcagcctcagcagccttaacttcttgtgttcaaggaatcctccccactcagcctcctgagtaccacacccggcctttacgtctgtttttgttttttgtttttttgttattaactcattgattgttgagaagtctgttgctttatttccaaaatgggacgatattagtcatctttgagtcaggtgagtcccacaagttcccagcgtctcctcatggtctgtgttaggggtccaggctgactggggttcactggtgtccactgggggcagctcccgtgccttcagcagtcctgagtctccttctgctgagtgtggggtctgcgtaccccccgggctagtggatggccagagtggcgtagatgctgggctcagctggaggttccccttcctgggatggaggaggctcagttgccttccgtctaagggtcaagctgtgcagctgggcgtaggtcacatcctgggaggcttcagatgcagcagcctgcagcgggggagagtgagaggtaaggaacgtggtgggggtgggggaggcctgggggcctggagaggaaaggactcacctcagtgtccatctgcctgtcctcttccacctgtctgtcctttgtgtccaggaattccccagacagtgaggagggaggagaggccatttctctcctaggactggagtgtttcaccggggcatacgtcactgcctgggggtcttcatcgtgtgggctctgctggagagagacagtggtggggggtgtccttgagtccccctgacctcctggagtcaattttcctcactgttcccggggtgatccgattacatccctttcctgatggaatctcagggacgccctaaggccgtggagggtctggccgctccctccctgtggttctggcctctgctcctcactctgaccttgcccatttggctgcagcctcacaggccttcctgcaagagctcgctgctgcctgggggcctttgcacggctgtttcctctgcctgcaggggctcgtccatcagaggatcatgtgccccactctgtccaggcttctcagatgacagctgagcagacagccctccccttccattcagactggccccactgccccacactctctgccctttccctggtgtatgttccttacagcacgttgcactcctggacacgatgcatttatttgcattttgtctcccaccgtgaggtgagctcaggaggcgggggcggctttgctccctgctgtgtctgcagctcccatggggagccccatccacagtgagctccctgggaacactcgctggatgaatgaatgaagaggagcccaggggacggaggtggttcatttattcgtcatcctcctgaggcctggggagagctctaacaaccagacggccaaacagaggatgaggagcaggaaggggacccgggaggaggcccacgaggtcccaggacagcagaagagagtgaggtcacagcaggcgggaggcagcatgctggacaaggaggggtccaccgtgacgatgctgagagccgggggaaggaggacagagaagtcctgcaggattagatctggcaccaggaggcctttggtgcctgggacggggcgggatctcacctgactgtccagctccaccctgtcctcagactgtgtgtccttcacagcagcatctgctggggcagagcaaggggttcgtctcctggttctctgagacctctcagtcctgctggccccctgccctgctcccagatggggccaccgaatgcagggaggtcccacagtgtggggcaagaccatcttccacggagccccagacccttcccagcccctccctgttgctactgaaattttgggactcctgtctctccagcacccccatttgtcccctctcttcctcttacagaggttttcttcctggacgtcagcagctgggctggacctggaggaggacatgggagtgtgaggggcagtgtatgggctgtggtgggtgggagtctgtggtctttggggcagaattacctcctcagcaggcccctgtccttgggctctgtctccgcagcccctgcaggacgctggaaatcagtctttctctggtctgggtgaagatggacagagtctcagccctgggaacattagaactcccattctacacatgcaacttgagggaaagaaggaaaactaaaaatattcctgcatggatgttccaaatattttatgagatagaaaaaaactcccatgaatactgaagtttgtaaatgcgtattgaaattacgtgcccctggaaccggttttctaaactgacacccctgtgtgtttgggttccctctggctggtgccctgagcccaccctcggtcgacccatgggtcccccgcttccctactcaccagatgtcctgtgtttgctgtgacgctgacggaggaggaggaggaagaggaggaggaagagcagcaggacgaaggccaccgagaccccaatcaaaacctccaggtatcttcccagaccttgacatgaggacgtcaggagtgggaatgatgtcattgatgtgagcacctactgtgtgcaggcgcgagccaggtctttccttcgtgacctccaaccctcacaagcagtcgtgcaacatggaattgccacccgtacaacccatttcacagatgcacaaactgaggctcagagcagggagtcgcctgccccaggcctccagcgaggaagcggcagagctgggaagggagcccgggagtctgacctgcagcccttgttcctgcaccagagccgagacccggagctgcagggaaagagcctgaccgtcctgaaccacggccctgctcccctcccctgccccaggtcaccgtcactgctgcaggtgggacgggacaggcccctgtggaatcgggtctgggaggttccctgggaggcctcctctcccaggaggtcacagctgggggtcagagctgaaaggaactttcccacccacaggcctctctcctttacacttggagaaactgaggcccaggcaggggaggggcctgtccacatcaccacctccagaggagcctgaacctaggacagaacccacccctgcctcccctggaccccgcccatctcccactcagagcccctcactcaccattctgagggcctgaccctggggggttaaggggctggtcctcaggacctcctgggtcaggacagggaggtgaaggctggggctgtcttgccccccacatcagcccggctcctcctcctggctgggccccaacatctccctctgcctcgacccccgcccctcaccagcccagcctcagagcccctgggacacaagcccgtccttgaggggaggggagtgggatcctttgggagactcagactgccctgggggaggcggcgctccccaagaggcctcagtgactcaccaggtgtggagggcggccctgtgggtgggaggctggagcctccagagtgtcctggaaggagcacgggaggcgggtgaggggcgggggccgtccatggagtgcacccttccactcccactctcctgcttccgcccagtggattccctggaaccatctctctgcccacctggtgccttctgcatgccaggcaggggagaacgggtggccacgcctaggagaacccctgttggcctcctcccctctgagggctgggtgccctctggctaagcctccctcacagcctccctcggtccatcccagccgagagctctcctgggggcctgggccggagctgagcctttgagctcagagaggacggggtcagcgccctcacctgagaccatgagttccaggggctcactggggaaagacagcaggtgggggttggagctgcgtgagccgtagcacctgtaggtccccgcgtgggctgaggtcacaggactcatggggaattcagcctggtacttatgagctccgtacattgatctcagacgcagtgggggatgggctgccccttctttggtcagaaggaaagtgtcaaaatacccccgtgactgacacagcagggtcatgttctctcctgaggccactgtggggcccggctgtgctgacagggagacggtgtcatagatctgtcctggagagaagaaggatgggtgaggggctgccccaccttgctctgagctgacacctccccaggcctctccctgggaccctcagtgtctctgtccctgttttctctgagtctcccctccccccatcccctgtctctgtctgtctctccctcccttgggacccccacccctcatcccggccatcaccacctgggctcccccggcagggcctgtgcagagcctgggtccctgactgaacccgctgggctcctcacctgtgatcaggatgtccagggggtcactgggggccgaccactcggaggagaggttgtgtgcaccatagcacctgtactggcccccgtaggagcggctcacagggcccagggtgaagttggcctgggagagcccagcctggggctgctggccagggcgctggaggaagtcacgttccccctccttatacagaacaaatctgtcgtagccgacatcagagccacactggagggtcaggctctgcccaggggccaggacagggccctgcagggtcaggagggagggcttcctagacacgcctggagggaaagaggagccaggactgagagggctggttcctcccacgccccttccttctcccgtcctggccctgcaggtctcactgtctctcacgctctgagtctctgaccccagggcctccttctcacccggggctgtcttggagtcatttcagaggagtggggtctccctagccctggccactgtgcctgatctttcctcctctccctgagagctgggacctcacagcaaacacaccgatgccttcctgagtcctccccttccaggtgaacgtggtcaagggctcctcctcccatgtcagagcctccccatggggtctccctcatgccttcagcccgtccttcaacacatcactctgggtcctttccagattcagtcaccagccaaactccccacaacctgtcagctgccccgaaagtgtgttagacaaggccgtggctccctcacctgagggcagaatctccagggggtcactggggtgggaccacacccagggggtgtttgtataatagtaatagcatgtgaacctccacctgtggctgggggtcacggggcccacagggaacagggcctggaaccccccactgtggagctgctgtgagtccagggtccgggggagctggtgttctccttccttcatcagaacaaaatggtgatatcccttctgtgagccacatcggagggtcatattcccccctgaggccaccacagggctgggcagggctgagagggtgggtttgttgtagaatcctaggagagaaagaggcaccgtgttaaatggggctcccacctcccacatcatccccagggctgggctgtgagagggagacgcccctgagagccgacccccttcctgagggcagagcctggggctgggaccccagagtgtcctctcacctgtcatcaccagctccagggggtcgctgggctctgaccagcctgcagagctgtaatagtggcagcggtatctccctgcatggtgctgtgtcatggatgggatggagaatctggccttgttcttgggttccagtgggttatttctgtcccagggctctgggcttccctctttatccagttggtactcctgggcctccaggctcccctgacaccagatggtcacggggctcccccagctgatcacagagcctggctcagcccagagggtgggtttggggaagggccctagatggaaatcagaggctggatcccaagacatccccacgctcagatcccagctcccagccccaggacttccccatcatccccatcagtcacccagaactactgtctcctcccccagctgcccatgggtggccccctgtcccagtgaggagtagggacctgggacagctggggacagactcacctgcctgcatgcgggtcctggggcccagactcagccctggaagagagttccctgtgaggcatttgccctgaagcctgagcaggtccccgcccgggtgcctcctgagcttttgaggtctcctgatggaccagggcttgtgtgtggggtggggttcctccaagactcggatctccccctccccatcttgaaatctcaccaaggcagagcagggctgtgagggcgggcgtcatggcgtctcctcccggtgaccccgcgctctgcagagggatgagccctcagtgctggcaggacagagagacacacagggtgtggccgctcggaggctgggtccttcttgtcatggggttgtctcatcctcagcccacaggaagaggaactgccaccccaagaacctggctctgatttccccagggctgaagtgggggcaggcaccaggctctctgcaggcatttcagagagaaatggggtctccctgcccccgggccactgtctgcctgatttatctttatctcactgaggacggggacacagccgcaaatagacctggtgccttcctgagtcagcccctttcaggcgagggtgaccgtgggctcctcctccctctcagagcctccccatggggtctccctccctccttcagctcgtccatcagttcagcgttacggggtccttaccatggcagtcgtctctccagccctggagatgcttcagggaagacccaggtccatgctgcaggcagactcagatcagcagagacgcacctgacacctggctgtgtagtccaggctgagctgcgtgtggcagtgagcacagagaaatgcagggtctaccgtggtggctcatgcctggaatcccagtacttcaggaggctgtggcgggtgatggcttgaggccaggagcttcagacagtcctgggaaacagactgtgaccctgtttctacagaaaagaaaaaagtgagctgggcatggaggctcatgcctgtggtcccagctactcaggaggctgaggtgggaggatcacttgggcccgggaggcggaggcttcagggagctatgatcaccccttggccttccagcctgggcgacagagcaagatcctgtctaaaaaggagaaatagaggggataaagagaaatatatatatatatgtttcattgtaatctataatctgattctggggaaggtgagctgatttgtatttaattcctgattatcatctagggtttatgtgactttggacatgaatgtcacctctgagcctgctgtcatgaaccccactcatcacagtggctgtgggggtcagtggtgcccaggacatgggaggctcagccatggtgaatttccagaccagttcagacaggagggtggggacgggagaggatcctggtgctgggctccacagtcgaggaggatgattgacgcccccactcaagagcccacatcggctccaaataccatgaaattctccttgtgatacgtctgaaatatgcagatcatcacagccacaggcagagaaagaggaaaaacagttcctcacattgagacgcatccccttccatgagcagagttcaatgctgagtggccacaggtgtctgggaccaccgagcgtcattagggaggaggaggctcccacctccatgtgggacagaagaggaaccccacgtcctcccaggcagggaggggtcagggctctgggtgaggctggaagcggtggctccccctcccctgtgtgtgtggacaggcgctggggggtctctgctcactcactggaggccacggtcagcgctcagcccctcccctgtgtgtgagaaacagattcgatccacggtggtcagacatgggcgtctgccccacaggtgagtgtgaggctggcgttggtcccatcgctgctgggcacaatcttgagctgacactgagtttgggggagtggggcaggagcagcggcaacaatccccttcatcaggctgatgcctggacagccgtgggagaaaccctttatgaaaggccaggtgcgtgggaggagccgccccacaggaatgacaaccgtatgaggacaaaatagacagttgttgaaatgcattagacagacatcgtgaaggtgaaaaactatattaaattaacgccattaaaaaggaatttatgtctgggcatggtagttcatgcctgtaatcccagcactttgggaggtggaggcgggcagatcacttgaggctaggagttcgagaccagcctgggtgacatggtgaaaccccatctctactaaaaatacaaaaaattatctgggcgtggtggtgagtgcctgtaatcccagctactcgggaggctgaggcaggagaatctcttgaacctggaagatggaggctgctgtgtgctgagattgcgcccctgtacttcagctgggacaacaggagcgaaactgtgtctcaaaaaaaaaagcaatttactaaccatatatacctactatgcaaacataacaaaatcaaagcataatttaatccagggcaagacagctgaaataataaatatatacattgggataaaatattcatgaaattttccagactgtatcatggaaagaacagaaattgaacaatagaaaatattgatatatacacgaagttgaatgagaagaaagaacgtgtctgtcacggtttcagaatgaaagaaggaagaaggatgttagttcatgatatgcatgaagagctaatggttgaaatttttacagaactgaagagaaaacatcagtttataactaaattgaatatctcgatcatggtaaagtgaaaaccatgaggcattaatttaaaataatcataaaactaccagagaaaatgtaaattacccttgaatgaatgacaagttcatcgggactggagttccaaagagcaaacagcagccccagaagatacaggagaaacaaccacaagcgtttaactgtgaggagagagttcctgtgctgggcctaattattactattataattatttattattattattattattatcttttgagatgcaatttcgctcttgttgcccaggctggagtgcaatggcgcgatctcggctcaccgcaacctggcctagttattattaaaggaccgagttgcagtgtcagctgtggataaatcctagaacataaggagactcggggcactcgtgacccgtcaggtcaggcggtggccttatgaggaataaggagggcgttttcagtgtccttttatcaggtactatgataacaacagagaaagagagagattgagacagacagagagagacggagagacagagagagattgagacagagagagagagggagagggagacacacacacacacacacggagagagacagagacagagaagcaggcatcgcttgagctgcaaggctgcagacatgtttgcatctgggctctttctgaaagcaatactaaacaatgtaaatcagggagtggaataatgaaccccaaatggagaagatgagatgctactgtgaataagtcaacagtacatacaaaaaacgaataagcatagatctatctgtaatctgtgtatatacaagtatatgcatttctactaagaatctgaaagagcaaggaaatggattcgcgtctctggagcctccagaaaggaatgcagccacgttatggccttgattttgtcctaaaagactgtgagataatgagtttgtgttgctgaagctgctcaatacgtgtaatttgttatggcagcaatagcaaaccaatactaacacaaacagcctttgaaaagaaaaatagatgatatttcacacttttatttatttatttatttattttattttattttgagacggagcctcgctctgtcacccaggctggagtgcagtggcgcgatctcggctcactgcaagctccgcctgccgggttcacaccattctcctggctcagcctcccgagtagctgggactacaggcgtccgccaccacgcccggctaattttttactatttttagtagagacggggtttcaccgtggtctcgatctcctgacctcgtgatccgcctgcctcggcctcccaaagtgctgcgattacaggcgtgagccaccacgcccggatatttcatacttttaaatcagcaatctgtgaagaagagaaagttatacactttcactcaaccaaccacatgtccttaaaatttacaaagcatcaattgagacacagtggaggatttgaagaaatattgatcagactttgatagattaagtgaacaaaatattcgtgagggttgcatggcacaaatgttcaatctcatgcgcaaatatgatgtttcgattgtttatatattatgtaaatttgtatagaaacgtttctggaatatacatatagcaacaaagtgggaatgcatatttctttatatatatttttttgaaacaaggtctctctctgttgctccatctgaagtacaatggcactatcccagctcactgcagcctcgacctcctgaggcctaggtgattctgccacaaccatttcctgagtagctgggactacaggatcatgccaccttgcctggctaaatttttttaatatgtatttttttgtagagacgaggtttcgctatgttgcccaggctggtgtcaaactcctgggctcacgggatctgcccaccttggccttccaaagtgttgggattactggtgtgagccactgtgcgaggccaggaatacttatttatgaaaacatattgatcagaaatatctatcttttttttttttttgaaacgaagtgtagctctgtcgccaggctggagtgcagtggcacgaactcggctcacggcaatctccaccttccgggttcaagcgattctcctgcctcaggcttgtgagtagctagaattacaggcgtgcgccgccacacccagctaatttttttgtatttttagtagagacgggatttcaccatattggcccagatggtctcggtctcctgacttcttgatctacccgccttagcttcccaaagtggtgggattacaggtgagagccactgtgcccagccgtctctatcatttttacacagcaaagtaagcatccaaactgttactacaggtaacgtttcctgattagaagttcaattaaattagcagccaacaataagaagacatttagagaaaaagcaatactttggaaacaaataacattctaaatattcatgggttataggctggatgtggtggctcatgcctgtaatcccagcactttgggaggctgaggcaggtggatcacttgaggtcaggactttgagaccagcctggccaacatggtgaaatgctgtctctactgagaatgcaaaaattagctgggtgtggtggcatgcacctgtattttcaatgactcgggaggctgagacgggagattcacttgaacccaggaggtggaagttgcagtgagccgagattgtgccactgcactccagcctgggtgagagagtaagactccatcgcaaaagcaaaaacaaatattcatgggttatagaatcacacaacattaaattgatagaacattaacgaaaaatgtcaatgaaattataacatatgaacgtttgtaggatgtaaagtaagagagtgagagagagagagggagcacaacaattaccaaatcaagatggaaagaggcaccactacccatcctacagacataaaaggactagtgaagcaaaactaggaatctatgctaagatgttttacaactcacatttaatagaaaatatcttgaagtatacaaactaccaaaatttactcaagaacaaatatatagtgtaacatttcctatttttattaaagaaattcaactggctgggattggtggctcacacctttaattccagcaccttgggaggctgaggcgggcagattacctgaggtcaggaattcaagacctgtctggccgacatggtgaaatcccacctctactaacaatacaaaaattagccaagtgaggtggcgcatgcctgtaatcccagctactcaggagggtgaggcaagagatctgtttgaacccaggaggcggaggttgcagtgaggtgagatcacaccactgcattccagcctaggcgacagagggagactctgaaaaaaaaaaaaaaaaaagaaaagaaattcaacctacactcagaaatctttccatagggaaatctggcctaaatgggtacactgttgatttctaccaaatatttgagaaagtaagaatgacatggaaactctagctatcattcagttctcactaggctcatcgacttcttcattccagtccatgggttcttatggacacatccagccagttcagtccaagttccttagtggggcagcagtttggtgctgttggtgttgctggaagctctttgacctcctttggaacagaaatatcaaacagtggtagcttgccccaaagtagagtggttgattctgcctttacacaggatacaagatccctaaaaacacaattatctcaaggtccttcaagcgctcagttcgaccctttgagaagaagcccaaccatggaacaaggagtgcagaccgcctgggcccacggacctgctccagcacctgttgggagaaggagtcctgtatcaaccaggcctttgccatctaccagccaaaaagcaatagagaatcaggagcagaggtgagctgaagcgcacaacgttccaaggccagaaaatgagcaactcagaaatgaaacaagagacaagcagctccaggtgctccttcagcgccaaggagagggcgtgggggtcatggggtggcaggggaagatttggtattcggcgagatgggccaatgaaatttgagaatttttttttttttttttggagacggactctcgctcggtcgctcaggctggggtgcagtggcccgatctcggctcactgcaagctccgcctcccgggttcacgccattctcctgcctcagcctccccagtagctgggactacaggcgcccgccaccacgtcaggctaatttttttgtattttcagtagagacggggtttcaccgtgatctcgatctcctgacctcgtgatccgcccgcctcggcctcccaaattgctgggattacaggcgtgagagaaagagtttgactttgaaagtgcaaatgcccaattcaacaaggaagagatgggcagagagtttcataataaacttaaattaaaagaagataaacttgagaaagaggagaagcctgtaaatggtgaagataaaggagactcaggagttgatacccaaaacagtgaaggacatgctgatgaagaagatgcacttggacctaattgcttttatgaccaaactaaatcctcctttgataatatttctggtgatgacaatagagaacggaggccaacctgggctgaaggaagaagattaaatgctgaaacatttggaatcccactttgtccaaaccgtggccatgggggatacagaggcagagggaggtcttggtttccatggtggcagagggcgtggtggcagaagtggtaccttgaccaccccttgaggatttcgcggcggattcagaggaggttccaggggtcgggagtttgcagattttgaatataggaaaagcacagcctttggcccctaaatagtctgaattgatagtactgctctctgaaagaaagacaacaaagctgctgcatagtctacaaacaagtctttgaaaacaggtgaatttctagctcttcatggtactggaaactgatttcagtctttgcgaagaacgaagaagtgaattggctgtatgtttgccatcagcactgggtttttgttttttgtttgtttttctgtttaatttcagagataaaatgcagttagttttcgggggaggaagccttatcttaagacatgaggattaaatatatttggaatagcagaaggttaaataatttcttatgtatagttaaactaaagcagtacttcagtgggacttataagtattgtgtcatcactgaaaggttttttttttttttttttaatcactgaattgtatttggtaattccaggttgcctgcagatagggccgtgatactgtgttctgagccaagaagggagggtgtgtgtgtgtgtgtgtgtgtgtgtgtgtgtgtgtatctttctcctcctttcttttggggaatcttgtaatattaaatagtctatttcatcaattaattagggtgctggatggtagagaattttgtcagtcaactaggtacacacggtaaatactgtttcttaggcaaacgaacttttttatacagttgtaaaattccattatattccaatgccaaagaaacattaaaaactttgtaaagttgtataaaaagcaactaattttttacaaaatagatatcctaaagttagccaaaaaaaagagaaaagggcaaagtgatcatttttggcgtagggtaacccttagtttcttccctggtagtaatttcccaccaggcagatcgtctaaccccaaatcacctaaaagtgcaggcccaggacgtgcttatctgcccagtgagtcacctggaggggtggtgatgggggctgttgatgacacgctcctttcctttcccagcccgtgtgttctacctctgaaaagacatagcattttcatttgcagagcccattatagaaaaataagaacaaaaatattagaaggaaaagacatagcatcatttagtgttcattcatatgaatatgtatattgtctacagctatctatatctctgttttatatctatgtctgttacaccatcagagagcacctaaagtgcagagtctcatccacaaactgtttcttgcatctactgtaagaggccattccgatgctctgtcagccccagcagcacccaaccactacatggcacgcatcctatctcagatcatccccaggatatcacgtggccctgttctcattgccccactgatttcatgggcgtgcaggtccctcgatctgagattaagtcatgagatgctccatttaaacaggcgggagcctctgattcctggcggagagccacagtgagcccagcagaacccatctgagcgccagcatccagcccggtcaggaggatttgctgccccctcctggtggaatgcgcgccatgtcgtcaagcggccaccagatgactcgctcgctggtccactcaaaggcatcacatccagagcgctctgctggtcacaggtgagactctcagcgacagtggtggctgcttggtccttggtaagagggagtcgctggtgttggttccatgcatgtccttttttctttgattcttttattttattttatttagagacggagtctcactctgtcgcccaggctggagtgcagtggcgcgatctcggctcactgcaacctctgtcccctgattctcctgcctcagcctcccgagtagctgggattacaggcaccttccaccacacctggctagtttttgtatttgcagtagggacggggtttcgccatattggccaggctggtcttgaactcctgacgtcagataatctgcccaactcggcctcccaaagtgctgggaatacaggcgtgagtcactgcgcctggcagcatgtcctttttttcttgctccatggccacgacactcacgggcccctccagcacgcactggggctgctgacacagagctggctgaagctcacggcattaacccagtcatcagcggatccttagatctcctaaccccagctgtgggcgctcctgctagcttctcaggagaagctcctggtcgagagcagacgtttctcctgtcctcctccagcctcagtctccggcagtttctgtgtgcctgggccttgagggtgggtttgtctccgtgtttctgtccccgctcctcatggcagctgcattgtattgagtaggtttgtttgatggggacgggttttctgtccctattccaaatttgcatatctctaatggtatttgtctaggatcacagtccaggattgttctctgcactcctcctagggtagagggattttatgatccaccttcttccggccacaatgagtcattacctgggatctgaggtgggcagaattatctgagcctcttccaatggcttatgtcttttcctccatgtgagagaaacacctgggtgggaaatgagatttcaggccatgcacagtggaagctctttctgtctgatcactaatgtggggtctccatcttgctccaaatcagttttgtgaatgcacggttgagacccaagaaaaagagcctttgggtgagtgcacagcacccctctgtcttaggtccccagatatatctcaatttgggcttcttctggaacatgaaactatttactttgagtttcctacgaaaacatagtgctggccttagacttcctatcctgaaaccccacgtctatttcccaacctcatgcatggaaaagtgctcgaatctccataggatcagcaagatctctatagaatctccatgggccctccacaggacctccataagatctcaataggttctccacaggttctccataggttgtccatagaacctccacaggacctccataggatctcaatagaacccccacaagacctctataggatctcaatagaaccctcacaggacctccataggatctcagtagaacccccacaggacctccataggatctcaatagaacccccacaggacctccataggatctcaatagaaccctcacaggacctccataggatctcagtagaacccccacaggacctccataggatctcaatagaaccctcacaggacctccataggatctcagtagaacccccacaggacctccataggatctcaatagaacccccacaggacctccataggatctcaatagaacccccacaggacctccataggatctcaataggacatccacaggacctccatagaatctcaatagaacccccacaggacctccataggatctcaatagaacccccacaggacctccataggatctcaatagaacccccacaggacctccataggatctcaatagaaccctcacaggacctccataggatctcaatagaacccccacaggacctccataggatctcaatagaacccccacaggacctccatagaatctcaatagattctccataggacctttgcaggacatccataggttctccgtggatcttcataggacctcgactggatctccataggatcttcacagggcctccgtaagttcttcacaggatttccagagttgccacaggatctgccactgcagggaccagccggcatcctctacatcccaagatgctggaaatgaccacgtggtgatagtggttatggatttcctacaggagaatgtgtgaaaccatgttcctgggcaaccctgcggagtcccaatctccattcagatcctccaggggccaggctggagggggtgtctggtgtgtcactgtgtctgttcacacagaatgggggcttctgcagtaataatgggaaaccagcccagagatagaggcagggattggagttatgctgtcataatccatgaagtgctgagctgaggaaaccagctgagcttggactgtagcgttggacaggagacattgataaaaaggactctgtggtagaatggtgtggatttgttcattgtgtgtgaagaagaagatgctcagggaatgaaagctcttccattctctgacttggttgacaagaggaaccaatagggccatcacaggagcaatgaccccatgtgggaagcagactgaaggagatgtattaaaaacagttaactaagtcagagagagaaacagagcctcccaatacctggaaagcatggtttgttcctcccaaacttcctccctctgacttctttatttctctacgtagcagcacctcttcatttctccatcaaaggctctgagctgtttgagttcctcatatattctgatgatcaaacccttgttagaggaataggtaacaaatgtttctccctgcctctgtaggtcataacaccgttggttgtttcctgagctctgcagaagctttttagtttgatacacccatttgtctatttttgaattcgtttcctatgcttttgaggtcttactgatagaatgtttgcttagaccaatgtcttgaagcgtttcctctgtgttttcttctatagtttcatagtttcaggtcttactttgggtcttattctgtcttgagtagatttttgtatatcgtgagagacagaggttgagttttgtttttttgcatatggatatgcagttttgctagcagcatttattgaagaaactgtcctttacccaatatatgttcttggcatgtttgttgataatcagttggctgtcaatttgtggatttatttctaggttctttgttctgttccatttgtctatgtgtttgtttttaagccagtgccttactgttttggttactatagctttgtagtgtattttgaagtcaggtagtgtgatgtctccagctttgtttttttttctctacattgcgttggctattttgggtattttatggctctatattaattttagaattttttatatttcagtgaagaaagacacttgtatgttgataggaattacaatgaatctgtagatagctttgggtcctatggtcctttttgtaaacatttattgtttcaacgtgtgaacatgaggtatctttccagttttttcgtgtcctctttaatttttcttagagctttataattttatttgtagaggtttttaccttgtcagttaaatttattagcaggtcttttattgtttgtggctattataaatgggatttcattcctgaattctttttcagccagttctgttcttcagggtcaagcatcatgtaagttcccatgtaggaaaggaatccggaatgaacagcagctgcacacaaatgcctttctctgatttccacctcagaggggtccaggaggtgatcaggcacatggagcattgtcacatttggtaccaatcccagtgtgatccctaaaacaccacctgattgggttgagcctcatctctgaaataaccaagccctgtgtgatccctaaaccaccacctgattgggtggaacctcatttctggaataaccaagccctgtgtgatccctaaaccaccgcctgattggatggaacctcatctctggaataaccaagccctgtgtgatcatcctaaaccaccacctgattgggttgaacctcatgtctgaaataaccccaaggccatgttggtgtccttcatcccagttctggtggtttcaacataatgaaatcagaaagttatatggccacttaaaaatgtcaagtgcatgtcatgaagtactggacaaggtgtttccctttctgaggcccattcttacctgggtaagtggctcattgtctgcgtggactcaggtgaggttgatcaggcaggtgggtgtcatgttgtgaatgaaacacaaagtcaacctgtgagatcattgctctgacaggtcaagaaccacctggtttgccatttagtggccagtgcagcctgtggcattcaccaccacacttcaatctcagctccctaaatggcatgacaaataaagatagataggtacaaaaacagagatatgctattccctggttaaaatggctgttatctctaagacaaaaattaacagatgctgtcaaggatatggagaaaagaaacccttctaccttggtgggaacgcaagttggtgcagccaatatggaaaacagcatggaggttcctcaagaaactgaaagtagaacaaccacaccatccagtaatcgcacagatgggtatatttccaaaagaaagaaaatcagtatatcaaagaggtgtctgcattgccatgtttattgcagcagtattcacaatagccaagatatggaatcaacctatgtccatcaatggatgaatggataaggaacatgtggtctatatacacaatgaaataatattcaggcataaaaagaaggaaattgtaccatgttcagcaacacagatgaatctggaagacattatgttcagtgaaataagccaggcccagaaagaggagcatgttctcactcacgcggaagctacaaaagtgggccttgtgatggcagagagtagaatggttgtcaacagaggctggcaagggagtgtggaggacagggatggagagaggttggtggacgggtgcagaaatacaggtggagagaaggagtaagttccagggcctgagagctcagtagggtgaccatagttagcaacagattattgtattttccacatgagtgagaaatgaagatttggaatgttcccagcacagaaattataaaagttggccaggcatagtggctcacacctgtaatcccagcactatggaaagccgacgctggtggatcaccttaggtcaggagttcgagaccagccagagcaacatggtgaaaccccgtctgtaataaaaatacaaaaattagcgaggtgtgatggtgcatgcctgtaatcctagctactcaggaggctgagacaggaaaactgcttgaacccgggaggcagagtttgcagtgagccaagatcctgccactgcacgccagctgggcgacagtgcaagactctgtctcaaaataataaccataataacaaatgttcagggtgatgaatgtcctgggaacctttattggatcgttacacattgcatggatgaatcagattaccacatgctcccaagaaacatgtatgattattccgtatcaaattaaaattatgtgatttaccaataactcgaagtggattgagggtcaccaaatgaaagtcagcgttccagtgcccgcgtccagtggtccttggagtttccatgttgaacagaaccctccagtatttcctgatgtgcaagcactattttggattacataatctatttcctttatttatggggtctattttgagtttgcctccctagaaaataaatgctgcctctttttgagcttcatgtgcacaccttctttttatactcttgtttctttactcaacatcatgatggaaggttggtttgcattgctctttgtagattttgtctgtgcctctgcacggcctcgtagtatcccttggtggaattgaaccacatatgtttcctttgttttagatgtatttttgggttttatggctgttgtgtaatatgagcagcagtcctgtccatgttgttgtgaatgaaacctcaccatatgaacacattttcctctaggttctgtgctttgtgttcatagctgtgtgtctcttctttttttttttcttttttttttagatgaagtctcgtactgtcacctgggccggagtgcaatggcgccaccttggctcactgcaccaactggcgccaacttgcttccgtctcccaggttcaagcaattctcctgcctcagcctcctgagtagctgaaattacaggcacctgccaccacgcccagctaatgttttgtatttttagtagagacggggtttcactatgttggccaagctggactcgaattcctgaactcgtgtccgcccgcctcagcctcccaaagtgctgggattacaggcatgagccaccgcgcccggccatgtttcttctttttcactgggtacttctgatattttccccaaattgattcaagtaatttgcagtcctaccatggatgtattggatttctacgtgagccctactacctctgacatttgatattgtcattttcatcatgtgaaatgaatacctcaacattgatccctctcttcaggaatgatcgacagatagtccagaaagcataggctgtagattttgttccagaacctcctgggatcatcagattgaacacatgagggtgggagactgccatacaagctgggaaggaggaatcagatgatattgtcatgaattcctcaagagttagtgtttgctggcctccaagaggcaaggatctctgggaacttaagacagagaagcacttcacactcacccatgagctcttttccgtgggtctcaactgggcattcacaacatagattggaagtaaggtggagacccaaaatttgtgatcagacatgattaccttccacagtgtgtggcctgaaatctcacccccctctggaggtcctagattgtcctccagagccttctgggatcatcagatctgtccctgaggctccaccacgctgaagggtgcattgtcctctccgctgttcacctcccggctgcatcttgggggtttctctggctgtgctgagcctcaaataacagaatcccgaggaacaccaggaccaagcctgccatgcccatgcggatgagattctccactgtgtaatccttggcgtgtgaggctggggatggtgggcaaagaggtcacagaggtccgggcagatcaacttcacccaggacccctggatgcccaacccagggcaccccccatccgccattgacagaacctgaccctctgtgcccgccccataactgtctgacttgttttgtgatggggtgagggtctcagctcctcctgagaatcaaaacagaaggggagagccctgagccagcctctcccctgggctctgcgttcttattcttccaggcctcatgacgtggcttttacggagttcctcaataaaccctccctctcctgcagcagggctccctccagtctcctcatgaaactatttcagttttcctgtgttctatgaatttcaacgctgctcctgagccatttcctccctcccatgggctggattctccaccttcactcccttctttcctagtgtcccagagctctcctgggtgcagagcctgagctgagcatttgagctcagagaggacagggtcagggccctcacctgagaccacgagctccagggagtcactggcctgaccctggggggttgaggggctggtcctcaggacctcctgggtcaggacagggaggtgaagcctggggctaccttgctccccacatcagcccggctcctcctcctggctgggccccaacatctctctctgccttgaaccccccactcttcaccagcccagcctcagagcccctgggacacaagcccgtccttgaggggaggggagtgggatcctttgggagactcagactgccctgggggaggcggcgctccccacgaggcctcagtgactcaccaggtgtggagggcggccctgtgggtgggaggctggagcctccagagtgtcctggaaggagcacgggaggcgggtgaggggcgggggccgtccatggagtgcacccttccactcccactctcctgcttccgcccagtggattccctggaaccatctctctgcccacctggtgccttctgcatgccaggcaggggagaacgggtggccacgcctaggagaacccctgttggcctcctcccctctgagggctgggtgccctctggctaagcctccctcacagcctccctcggtccatcccagccgagagctctcctgggggcctgggcctgagctgagcctttgagctcagagaggacggggtcagcgccctcacctgagaccatgagttccaggggctcactggggaaagacagcaggtgggggttggagctgtatgagccgtagcacctgtaggtccccgcgtgggctgaggtcacaggactcatggggaattcagcctggtacttatgagctccgtacattgatctcagacgcagtgggggatgggctgccccttctttggtcagaaggaaagtgtcaaactgccaccatgactgacacagcagggtcacgttctctcctgaggccactgtggggcccggctgtgctgacagggagacggtgtcatagatctgtcctggagagaagaaggatgggtgaggggctgccccaccttgctctgagctgacacctccccaggcctctccctgggaccctcagtgtctctgtctctgttttctctgagtctcgcctccccgcccatcccctgtctctgtctgtctctccctcccttgggacccccacccctcatcccggccatcaccacctgggctcccccggcagggcctgtgcagagcctgggtccctgactgaacccgctgggctcctcacctgccatcaggatgttcagggggtcgctgggggccgaccactcggaggagaggttgtgtgcaccatagcacctgtactggcccccgtgggaggggctcacagggcccagggtgaagttggcctgggagagcccagcctggggctgctggccagggcgctggaggaagtcacgttccccctccttatacagaacaaatctgtcgtagccgacatcagagccacactggagggtcaggctctgcccaggggccaggacagggccctgcagggtcaggagggagggcttcctagacacgcctggagggaaagaggagccaggactgagagggctggttcctcccacgccccttccttctcccgtcctggccctgcaggtctcactgtctctcatgctctgagtctctgaccccagggcctccttctcacccggggctgtcttggagtcatttcagaggagtggggtctccctagccctggccactgtgcctgatctttcctcctctccctgagagctgggacctcacagcaaacacaccgatgccttcctgagtcctccccgttcaggtgagcgtggctgagggctcctcctcccatgtcagagcctccccatggggtctccctcatgccttcagcccgtccttcaacacatcactctgggtcctttccagattcagtcaccagccaaactccccacaacctgtcagctgccccgaaagtgtgttagacaaggccgtggctccctcacctgagggcagaatctccagggggtcactggggtgggaccacacccggggggtgttcatataatagtaatagcatgtgaacctccacctgtggctggggttcacggggcccacagggaacagggcctggaaccccccactgtggagctgctgtgagtccagggtccgggggagctggtgttctccttccttcatcagaacaaaatggtgatatcccttctgtgagccacattggagggtcatattcccccctgaggccaccacagggctgggcagggctgagagggtgggtttgctataggctcctaggagagaaagaggcaccatgttaaatggggctcccacctcccacatcatccccagggctgggctgtgagagggagacacccctgagagccgacccccttcctgagggcagagcctggggctgggaccccagagtgtcctctcacctgtcatcaccagctccagggggtcgctgggctctgaccagcctgcagagctgtaatagtggcagcggtatctccccgcatggtgctctgttatggatgggatggagaatctggccttgttcttgggttccagtgggttatttctgtcccagggctctgggcttccctctttatccagtcggtactcctgggcctccaggctcccctgacaccagatggtcacggggctcccccagctgatcacagagcctggctcagcccagagggtgggtttggggaagggccctagatggaaatcagaggctggatcccaagacatccccacgctcagatcccagctcccagccccaggacttcctcatcatccccatcagtcacccagaactactgtctcctccccacccagaactgctgtctcctcccccagctgcccatgtgtggcccttgtccctagtaaggatgagggacctgggacagctggggacagactcacctgcctgcacgtgggtcctggggcccagactcagccctggaagagaattccctgtgaggcatttgccctgaagcctgagcaggtcctccccgccctggtgcctcctgagcttttgaggtctcctgatggaccagggcttgtgtgtggggtggggttcctccaagactcagatctccccctccccatcttgaaatctcacctaggcagagcagggctgcgagggtgggggtcatggcgtctcctcctggtgaccccgggctctgcagagggatgagccctcagtgctggcaggacagagagacacacagggtgtggccgctcggaggctgggtccttcttgtcatggggttgtctcatcctcagcccacaggaagaggaactgccaccccaggaacctggctctgatttccccagggctgaagtgggggcaggcaccaggctctctgcaggcatttcagagagaaatggggtctccctgcccccgggccactgtctgcctgatttatctttatctcactgagagctaggacacagcagcaaatagaaccagtgccttctggagtcagcccctttgaggcgagggtgactgtgggctcatcctccctctcagagcctccccatggggtctccctccctccttcagcccgtccatcagctcagcgttacggggtccttaccatggcagtcgtctctccagccctggagatgcttcagggaagacccaggtccatgctgcaggcagactcagatcagcagagacgcacctgacacctggctgtgtagtccaggctgagctgcgtgtagcagtgagcacagaggagaaatgcagcgtctaccgtggtggctcatgcctggaatcccagcacttcaggaggctgtggcgggtgatggcttgaggccaggagcttcagacagtcctgggaaacagactgtgaccctgtttctacagaaaagaaaaaagtgagctgggcatggaggctcatgcctgtggtcccagctactcaggaggctgaggtgggaggaccacctgggcccgggaggcggaggctgcagggagatatgatcaccccttggccttccagcctgggcgacagcgcaggatcctgtctgaaaaggagaaatagaggggataaagagaaatatatatatatatatatatatgtttcattgtaatctataatctgattctggggaaggtgagctgatttgtatttaattcctgattatcatctagggtttatgagactttggacatgaatgtcacctctgagcctgctgtcgtgaaccccactcatcacagtggctgtgggggtcagtggtgcccaggacatgggaggctcagccatggtgaatttccagaccagttcagacaggagggtggggacgggagaggatcctggtgctgggctccacagttgaggaggatgattgacgcccccattcaagagcccacattggctccaaataccatgaaattcttgtgatacgtctgaaatatgcagatcatcacagccacaggccgagaaagaggaagaacagttcctcacattgagacgcatccccttccatgagcagagttcaatgctgagtggccacaggtgtctgggaccaccgagcgtcattagggaggaggaggctcccacctccatgtgggacagaagaggaaccccacgtcctcccaggcagggaggggtcagggctctgggtgaggctggaagcggtggctccccctcccctgtgtgtgtggacaggcgctggggggtctctgctcactcactggaggccacggtcagcgctcagcccctcccctgtgtgtgagaaacagattcgatccacggtggtcagacatgggcgtctgccccacaggtgagtgtgaggctggcgttggtcccatccctgctgggcacaatcttgagctgacactgagtttgggggagtggggcaggagcagcggcaacaatccccttcatcaggctgatgcctggacagccgtgggagaaaccctttatgaaaggccaggtgcgtgggaggagctgtcccacaggaatgacaaccaagatacgtgaggaaaacacagacagttgttgaaatgcattagacagacgtcgtgaaggtgaaaaatagtaaattgaattaataccatcgaaaagtaatttaataaatatatacacctactatgtagccataaagtgaaaaatttgaccgggcgtggtagctcatgcctgtaatcccagcactttgggaggccgaggtgggcggatgacctgaggtcaggagtttgagaccagcgtggccaatatggtgaaaccctatctctcctaaaaatacaaaaacaattagctgggtatggtggtgcacgcctgtaatcccagctactcgggaggctgaggcaggagaatctctggaacccaggaggcggacattgcagtgagctgagatggcaccactgcactccagcctgggccacacagcaagactctgtctcaaaaaaaaaagaaaaagaaaaagaaaaaaagaaagtaaacaacttctaaagcgattcaagcaccagaagggttcaaatgaaaatgagaccaaaggaagtaaataaaaaagaggagggaatttgtgagaacacattttaaagggtccattttcaaggcatgatatccaagtattggcagccagtctgcggatgtaacaaaccgcacggctcatgctcctagcaaatcacaataagtgaacagaatggcggggggttgtgggggaggaggcggtcagcccataaaagggaaaaaaattttgttattgggaaatcgcaacttaagcggggaaggggacggggtacaaccttataagggggataatgaaactcaggcgaagtctgggaagattgtaacctcatagtactcgaccagtgaggaactggggaagggatagttgagtgccaagagataaattacctgctgtgactgccccggctatgcctacctagcagacatccaattttgcaagaccctgttaaaagtctcactttcaggcgggacatggtggctcacgcctgtaatcccagcactttgggagtcaaggcgggcggatcacgaggtcaggagatcgagaccagcctggctaacacggtgaaaaccgtctctactaaaaatacaaaaaattagccgggcgtggtggcgggcacctgtagtcccagctgctcgggaggctgaggcaggagaatggcatgaacccgggaggcggagcttgcagtgagccgagatcgcgccactgcactccagcctgggtgacagagcgagactccatctcaaaaaaaaaaaaaaaaaaaaattcgcagcagggtctgctggggcaaagcaaggggttcgtctcctggtaagtttccctgggacctctcagtaccacctccccctgtcctgctcccagtgggactgctgagatctagggagcgggtgtgatgtccctgaggttccacagtatgaagtgaaccatgttcccctgagccccagacccttcccagccccttcctgttactagtgaaactgcagggtccccatctgcaccccaggtgcaccccctcttcctcttactcactgaggttttcttcttggatgtcagcagctgggctggacctgggggaggacacgagagtgtggtgtggtggagtgtgggagtctggggtctttgggcagaattacctcctcagcagacccctgttcttgggctctggtcccacggcccctgcagggtgttggaaatcagcctctctctgggctaggtgaagaaggacaaagtctcagccctgggaaccttagaaccacccacccagtacatgcgactttaggggaaaaaatgaaacttgaaaacacacccatatatatatatatatatatatatatttttttttttttttgagacaaggtctcgctctgtcgcccaggctggagcacagtggtgcgatcccagctcactgcagccttgacctcatagggtcaagtgatcctcctgcctcagcgtcttgagtagctgggaccacgggtgcacaccaccaaacctggcttatttgcatttttaattttttttgtagagatggggtctcaccacattgcccagagtcctctgaaactcctgggctcaagccatccacctgcctcagccttccaaagtactgcgattacaggcatagttgttttaaatactggatacacttaaaaaggcccgaagacgttgggccgaatggctcatgcctataatcccagcactttggaaggctgaggcgggtggattgcttgaactcaggagtttgagaccagcctcggcaacatagtgagaccccccatctctcccccgcaaaaaaataattagcctggcgtggtgataggggcctgtagtcccagctactcaggaggctgaggtaggaggatcattgaggatcttgggaggtggaggttgcagcgagccgagatcacaccactgcactccagcctgggtgacagagccagatcacgtctcaaataaaataaaataaaaagctcaaagaataaattacttgcacatacactcatatttattctcttctttctagatttttcagctgggactttctggagctgtttttctaagctgactttcttgtgtgtttggttcccctttggttggtgccctgatcccaccctcggtgggcccacaggttcccccagtccctgctcacccaatgtcctgtgtttgctctgacgccgacattggaggaggaggacgagcggcaggacaaaggccactgagaccccggttacaacccccaggtatcttcccagaccttgcgcgtgatgacgtcgggaatgaggatgacatcgctgatgtgagcacctactgtgtgcaggcgcgtgctgggtcttcatgagctctaaccctcacagcagtcgtgcaacgtgggattgccaaccccccaacccatttcacagatgcacaaactgaggctcagaggggggaatcgcctgccccaggccccccagcctggaagaagcaggtctgggaggggaacctgggaccttgtgttttccccagctgtcctcctgctgccccaccaggtggacacctgcttcctgctctgggtcttctcatctgacagcaggggcctgtcttagtgtctccatctggggctgtgtcctccttacaaccctcccttccccagcacagcagggcctgggggagggagtgggctgtacaggacggaccctgcattgctctcacccccagcccagccaggtccatctcctactctgccaatccctgaccttcccatgcagagcctttgaccacagactgaagggctgcactgtcggcttctcggcttctgaggttttggtactcggactagcttccttgctcctcagcttacagacagtctattgtgggacctcaccttgtgatcgtgtggatcaatactccttaataaactcccctttatatatacatctatcctgttagttctgcccctctagagaaccctgactaatacatgtttctgaaatacgcagccatagaaggaaatgagaaatgaaacttcctgacacaggcaggaaacctcaggaagcagcgaggtcagagctgagttggcttctggtgacttgcaatgtcagggaatcactaaaagggaggtttccgcctctatatgagacagaggagaaccccagggccctcacagtcagggaggggttggggttttgggtgaaagtgggaagttgtggctcctcgtcccctgtgtttgtggatggcactggggtatctctgctcattgactcaggtttatggtcagccctgagcctccccctctgtgtgtgtgaaatagattcattgtagagttgtcagacatgaggttcacactggaccctcccctgctggttacaggcctgagcagactcacaagacccgggcaggtggtgccgtcctcctcttttcaagcctaacgcccagtgcagccctggtagaaaccctctctggcagatgaggcactgggagatgagtgtccaagaatgagaagaaagaggaatcatcctaatgataaaaagtgctatgactggctgcctgcgatggctcacgcctattttcccagcgctctgggaggccgaggtgggcagatcgctggagcccaggagttcgagaccagcctgggcaacatggtgaaaccccatctctactaaaaagacaaaaatgaactgggtgtggtggtgcacacctgtagttccagctacttaggagcctgaggtcgaagatcgcttgagtctggcaggcggaggttgcagtgaactggggtggtgcgccactgcactttagcctgggtgacagagcaagaacctgtctcaaaaacaaacacaggctgggcgtggtggctcacgcctgtaatcccagcactttgggaggccgaggcaggcagatcatgaggtcaagagatcgagaccatcctggccacacggtgaaaccccatctctactaaaaatacaaaaaaaaaaaaaaaaaaagattagctggttgtggtggcgggcacctgtagtcccagctactcgggaggctaaggtaggagagttgcttgaactcaggagacagaggttgcagtgagctgagatcacgccactgcactctagcctgggtgacagagtgagactccgtctcaaaaaataaataaataaataaataaaaacaaaaaacaaaccaaaaaatcaaacacaaagtgctatggttgacaatccacactcactaatgaggattatcatggtcaaaaggagtactaggaatgtgtgagacccatcttaggttaaacatgtttaaatatttgagaaatacagaggacattgaatttctgaggcaggattatatgatttttttttctacagcagaatgaatattatataaaataattagaagacatagaaaaatcagatttaatgaacacaatcaaaatactcattccttcgaggacaagacacagtgaagcaccaattatgaaattagaaaacaaaacagaattttttttagagtgtagcatagaaactttataaattgcaatttaaagtacttgggagaatagaatgaggagggggaatgtcctatctattgtaggcgtcagaaagaaggaagagaaaacgatgtctagcaatagcccaagaggtgagtagctgaacattttatagagatgaggagagactaactaaggactagggcgcatccctttaaaattgaaatgtatgggctggacgtggtggctcacgcctgtaagcccagcactttgggaggctgaggcgggcggatcacctgaggtcgggagtttgagaccagcctgaccaacatggagaaaccctgtctctactaaaaatacaaaaattagccgggcgtggtggcaggtgcctgtagtcccagttactcgggagactgaggcaggagaatcgcttgaacccgggaggcagaggttgcagtgagccgagatcactccactgtactccagcctggtgatagagcgagactccgtctcaaaaaacaaaacaaaacaaaacaaaaaccctcacacaaaaaccaagacaaatccccttgacacaagtttatctgtctaacaaacctgcacatgtatccctgaacttaaaagtgaaaaaaataaaggcaatatgtgtcagatttgtggtggtgtctgctgtttcacccccatatggaaatgtgtgcctgaaccccgcttttttccttgcttattgtggctaggatttgtgaatgtaattcacattctcaagaatgagcttttttggcttcatcgagttttcacgtagccctcattagtaactcctcttgttatttttgtccccttcctcacaccttcatttggaataatttgttgttctttttctaaattctttctgtcattgccaaggtcattaattacgtaggttttattcttttctaattcattcgctcatttgtagttttccgatttcatcatttaatgtgtaatatttacattatcattccaaatttataccatgctctaatttctgtttcagttttctcagctcattgatttattgagaagtctgtggcttcatttcaaaaatgcaaggatattagtcatctttgactgcagaatctagtgagtcccagagttcccaggatgtcctggtggtctttgttaggggtccaggctggctggggttcattggtgtccactgggggcagctcctgtgccttctggagtctctgagtctccttctgttgagtatgagatctgggtcccccgtgggctagtggatggccaggggggcgtagatgctgggttcagctggaggttccctttcctgggatggaggaggctcagttgcctcccgtctgagggtcaagctgtgcagctgggcgtaggtcacatcctggggggcttcagatgcagcagcctgcagcgggggagagtgagagggaaggaacgtggtgggggtgggggaggcctgggggcctggagaggaaaggactctctcagtgtccatctgtctgtcctcttctgcctgtctgtcctttgtgtccaggaattccccagacagtggggaaggaggagaggccatttctctcctaggtctggagtgtttcaccggggcatacgtcactgcctgggggtcttcatcgtgtgggctctgctggagagagacagtggtggggggtgtccttgagtccccctgacctcctggagtcaattttcctcactgttcccggggtgatccgattacatccctttcctgatggaatctcagggacgccctaaggccgtggagggtctggccgctccctccctgtggttctggcctctgctcctcactctgaccttgcccatttggctgcagcctcacgggccttcccgcaagagctcgctgctgcctcggggcctttgcacggctgtttcctctgcctgcaggggctcgtccatcagaggatcgtgtgccccactctgtccaggcttctcagatgacagctgagcagacagccctccccttccattcagactggccccactgccccacactctctgccctttccctggtttatgttccttacagcacgttgcactcctggacacgatgcatttatttgcattttgtctcccaccatgaggtgagctcaggaggcgggggcggctttgctccctgctgtgtctgcagctcccatggggagccccatccacagtgagctccctgggaacactcgctggttgaatgaatgaaggggagcctgggggaccgggtcggttcatttattcctcatcctcctgaggcctggggagagctctaacaaccagacggccaaacagaggatgaggagcaggaaggggacccgggaggaggcccacgaggtcccaggacagcagaagagagtgaggtcgcagcaggcgggaggcagcgtgctggacaaggaggggtccaccgtgacgatgctgagagccgggggaaggaggacagagaagtcctgctggattagatctggcaccaggaggcctttggtgcccgggacaggggcggggcctcaccggagcatccatctccaccccgtccttgggctgtgtgtccttcacggcagcatctgctgggccagagcaaggggttcatctcctgggaaggttctctgagacttctccgtcctgccagcccttgccctgttcccactagggtggctgagatccagggagggactgtgatgtccctgaggtcccacagtgtgggttcagaccgcctcccccttggccccagaccccccccagcctgtgctcctgcccccattgctacagaaactttggtgctcccttgcccaccccaggtgccctccgcttctagtcactcactgagaatttcctcctggatgtcagcaactgggctggccctgggggaggacacgggagtgtgaggggcagtgagggggctgtgcgggtggatgggagtcttgggtcttcatgcagaattacctcttctgcaggccctggtccttgggctctggccccgcagcccctgcaggacggtagaaatgggctggacagagatggacagagggtcaggcctgggagaattcgaaccagctgccctgcacacacaactcgagcggaaagaaggaaacctggaggcccactggcactgaggctttaaatacgtcgtaagtttaaagtaaaatcagaagaatcaagcacttccacacatgctcacatttattctcttctttctcgatcgatttttcacctgggaatttctggagcagtttttctaagctgactttcctttgtgtttggtttccctctggctggtgccccgagcccaccctcggtcggcccacgggttcccccattccctactcacccgatgtcctgtgtttgctctgatgccgatgtcggaggaggaggaagaggaggaggaacagcagcaggacgaaggccactgagaccccagtcacaacccccaggtgccttcccagaccttgagcgtgatgacgttgggaatggggatgacgtcattgatgtgagcaccttctgtgtgcaggcgcgagctaggtctttccttcatgagctccaaccctcacagcagttgtgcaacatgggattgccaaccccccaattcacagaggagcaaactgaggctcagagaggggaatcgcctgccccaggctcctcagcctggaagaagcaggtctgggaagggaaccagggactttgtgttttccccagctgtcctcctgctgccccaccaggtgcacacctgtttcctatttgacaggaggggcctgtcctagtgtctccatctggggctggtgtccttcttaggatcctcccttccccagcacagcagggcctgggagagggagtgggttgtgcaggacggaccctgcattgctctcactcccagctcagccaggtccgtttcccactctgccaagttcccatactcccatgcagaacctgtctggataggggctctgtgtgtatctgggaagggctgagggtagcaggaggacggtgcccctgccgagctgtgtacagggccaggtcccatgattttgcttacgcctcgcagcagttctgtgagctggatgggactgagccagtttacagctgctgaaactgagtcagagtagaaagttgacctgcctgggcccacggtgggatgcggcagagctgggaagtgaacccaggagtctgacccgcagcccttgttctctgcacctgagcggagccccggagctgcagggaaagagcctgaatgccccaaaccacggccctgctcccctcccctgccccaggtcaccgtcactgctgccggtgggacaggacagtcccctgaagaatcccatcaatgcaggcctctctcctttacacttggagaaactgaggcccaggcaggggaagggcttgtgcacttcaccatctccagaggagcctgaacctacgacagaacccacccctgcctcccctggtctccgcccacctcccactcagagcccctcactcaccactctggggatccaaccccgtgggggtgaggggctggtcctcagggcctgctgggtcaggacggggaggtgagggctggggctgccctgctccccacatcagcccggctgctcctcccccaggctgggccccaacacccaacatctctctctgcctcgacgcccgccccctcaccggcccagcctcagagccccggggagcctgtggcccctcctctggctctgcccagctccctggagggaagctcccgcttgagtctttgaggggaataggatcctcggggagactcagggctgcctggggggagaccacgctccctccgagcccagaggcctcagtgactcaccaggtgtgggggtggagcctgtaggtgagaggctgggatccccagagggtcctgggaataagcacagaaagggagcgaggcgctttggtgctgagtgaggaaacccgtccctccacctgcccgtggcttctctggaaactttcttctgctcacctttcaccatttgcatcccaggagatggggccaagtgtgggcatgcctggggagcccccgttgtcctcctcccctctgaggggtgagtctccctctggctgagcccccctcaaaccctcccccccgcaccgcgactccatcccagcccagagctctcctgggggcagggcctgagctgagcctttgagcttggacaggacagggtcagggccctcacctgagaccacgagctcctgggggtaactagggctggacagcaggtaggggtaggacctgattgcgctgtagcatcggtaggttccaccctgggctgaggtcacaggactcatggagaattcagcctggtgtctataagactggtactttgactttagacacagcgggggatgggctgccccctccttggtcaaaaagaaagtgtctatctgatgccatgactgacacagcagggtcacgttctctcctgaggccaccttggggcccggctgcaccgagagggcgggtatgtcagggatcagtcctggagagaagaaggatgggtgaggggctgccccaccttgctctgagctgagacctccccaggcctctctaggagcctctgtctctgttttctctgagtcttcccctccccacccatcccctgtctctgtctgtctctccctcccttgggaccacccccccgcctcatcccggccatcactaattggattcccccggcaggacctgtgcagagcctgggtccctgactgaacccgctgggctcctcacctgcgatcaggatgtccagggggtcgctgggggccgaccacctaggggagaggttgtgtgcaccgtagcatctgtactggcccccgtgggagcggctcacagggcccagggtgaagttggcctgggagagcccagcctggggctgctggccagagccctggacgaggtcatgttccccctccttgtacagaacgaatatgtcatagccgacatcagagcgacactgcagggtcaggctgcctccgcgggccacgacagagccctgcgggatcaggagggagggcttcctagacacgcctggagggaaagaggaattgggacttggaaggctggttcctcccccgccccttccttctcccgtcctggcgtcctggccctgcaggtctcactgtctctcacgctctgtgtctcggatcccggggcctccttctcacctgggtctgtcttggagtagttccagaccgatagtgtctctctgactcctggccactgtctgtctggtctgtcctctcctcattgagggacaggaaattgcagcaaatacacccattgccttcctgagtcgaccccttccaggtgagggtgactcaggctcctgtttccccatctgagcctccccgtggggtcttcctcacgccttcagcccatccatcaacacatccttctggggtccttgccatgatcagtcatcaaccaaactcccaacaacctatctggttccccaaaattatataaagaagtgtggtggctttttcacctgggaccagaatctccaggaggtcactggggttcgaccacacctgagggtttttcctgtaatagtaatagcatctgaacctccacctgcagctgggggtcacgggacccacagggaacagggcctgggatggccctttggggagcttctgtgagtacagggtcctggggagcttctgttcttcctcaacaagaacaaacgtgagaagtccgtccagtgtatcacactggagggtcacatttcctcctgaggccaccacaggactcggcagggctaaaagagtgggttctgcatagaatcctagcagagaaggaggcacgtcttaagtggggctccgacctcccacatcatccccagggctgggctgtgagaggtagacgtccctaagagccgaccctcttcctgagggcagagcctggggctgggacccctgagtgtcctctcacctgtcgccaccagctccagggggtcactgggctctgaccagcctgcaggggtctcatagtagcagcggtatcgccctgcactgtcatacaccgtggatggaatgtggaacttggccttggctccaggctccagtgggttctgtctcttccgggcccatgggagtccctccttatccagacggtactcctcagtctccaggggcccctgacaccagagggtcacgggcttcccccgagctatcacagaggctggctcagcccagagggtgggtttggggagggtgcctagaatggaatcagaggctggatcccaagacatccccatccctcagattccagctctcagccccaggaccctccagacgtccccatcagtcagcccagaacagctatctccacccccagctgcccggggttgggcccttgtccccagtgagaagaagggacctgggacagctggggacagactcacctgcctgcacgcaggtcctggggcccacactcagccctggaagagagttccctgtgagggatttgcccctggaagccccagcagttcctctcctccctcggagcctctgatagaccagattctctgatagaccagagcctcgctttagagtgagctccctccaagacggggaccttccttccccctcttcaaacctcaccgaggcaaatcaggactgagagggtgagggtcatggcgtcagctcccactggactcagctgtgcaggcggatgagaccacggtgcctggcaggacacaaaaacacgcagagtgtggactggaggctgggttctccctgtcacaagactgtcccatcggaagccccacaggaaggggaactgccctccccaagagcctggctctcatttccccagggatggggctggggtgagctccaggctctctgcagacatttcagacagaaatggggtctccctgagccctagccgctgtcggcctgacctatactcagctcaccaagggctagggcagagcaacaaaacccctccgctgggaatgaacctctaagtcgttcctgcctcctcagtgcccctttgtccttggccgtccctctgtgcctccaaccatgttcaaggttttcagaacaattactcaggtttgtcatctgattcatggggtggagtggggagctgaattttcttcctaattccaccgattatgtgaccttggacagcaaagtggcttgcttgagcctttctcttttggaacttgtggtcatgacctcagcttctcagagtggatgtggggctcagtggtgcctgggacatgggagggggcttggccatggtgaatttccagaccagattaagacaggagtggttggggtgtgagaggatcctggcattgagctccgtagtagaggaggatgattgatgccccaactcaagagcccacatctgctccaaataccaagaaatgctccttatgtttgaagttcccggcacggtggcccacccctgtaatctgagcacctagggaggctgaggatggaggatcccttgagctcagaagttcaagaccagcttggggaacatagtgagaccccgtctctgcatataacaaagaagaaataatcaggtatgtttgtgcacgactgcagtcccaactatttgggacactgaggtgggaagattgcttgagcctgggtggtccaggctgtagtgaggtatgatcatagcactgcactccagcctgggtgagagagcacgaccctgtctcaaaacatacatatatatatatatatatatatatatatatacacacacacacacatacacacatctgaaatatgtagattatacatccgaaatatgtagattatgaaagttttgtgcagaaaaagaaatgaaaagttctttaatttgagaaggttgcacatcaaagaacaaacttgaaagctgacagcctgcttgtgtctaagactgtcccagggtcattagggaggaaatttccacttctgtgtgggacagaagaggaaccccaggtcctcatggaaagggagggggtaggggctccagatgaagatgaaaagctgtggcccggcccggcgcggtggctcacgcctataatcccagcactttgggaggctgagatgggcagatcacgaggtcaggagatcgagaccatcctggctaacacggtgaaaacccgtctctacttaaaaaaaaaaaaatagaaaaaattaagcgggcgtggtggcgggcgcctgtagtcccggctacttgggaggctgaggcaggaaaatggtgtgaacctgggaggcagagcttgcagtgagctgagatcgcgccactgcactctagcctgggggacagagtgagactccgtctcaaaaaaagaaaaaaaaaaaaggaaaagaaaagctgtggttcacccttgctcgtgcttgtggacaggagctgggatatctctgcccactgactgaagtccatgatcagcatggggccacctctcccgtttttgtgtttaacagattccgccgccgtgcgtggtgcctcacgcctgtaatcccagcactttgggaggctgaggcgggcggatcacctgaggtcgggagtttgagaccagcctgaccaacatggagaaaccccgtttctactaaaaatacaaaaaaattagctgggcgtggtggtgcatgcctgtaatcccagctacttaggaggctgaggcaggagaattgcttgaacccgggaggcggaggttgtggtgagacgagatcaagccattgcactccagcctgggtgacaagagtgaaactccatctcaaaataataataataataataataaataaataaataaataaaatccttgaagtccacccggcgttctattgcactgcagctgacctggcactcaagccacaagatactgtccttcctactcatccctcccctttcttaaggcaaaggagcctcatgccatgaccactgccacaacaggcttacagggagaactgccagtgttctcttaagccctaagggatcttcagtcagcttgtggtgaaggcttcctggcctgctattcatccgtcatgacactgggctctgcccaggcccagggcaggtccagaaatgatctctaagagcaaagtccttgaattgaggacctgagagcctacttggcactctatcccctgttgttgagctggtacctaaggtgcaatacaaagtcccttttactttttcttccacttttctcaccccacagtcaacatggctgggaaggtgctgagtctcacttgaagccagcaagtctcagagtctcacctaaggcccacgacatagtacctgtatattgctgctggttattcagggcctgagagctcttcagttagcaagtgatgaattctgccaggactaaatccttccccacaaggcagcaatttcccttctggcctagggtatgtggaaaaatgttgtccaggagctagcatctgggatggggacctcaggactctgcctgttgccctatcttactgtggctgagtgggtatccaagataaaagacaaagtcctctttattcttccctctcctctcttcaatcagaaggaaggaatcacttttgttgctacaagttgtgctgccttgggtagtgggaaggatgaaacaagtacacccttagctacgtttgctgatttctctaaattcactggctccaaactcagcacagcactaggattttcccaggaatcacagtacttgtggcctagactctttcaagcttgtttaagaccccagaccaggcgcagtcactcacacctgtaatctcagcactttgggaggctgaggcgggcagatcatgaggtcaggagtttgagaccagcctggccaatatggccaaatcccatctctactaaaaatacaaaaattaactgggcatggtggcacgtgcctgtagtcccagctacttgggaggctgaggcagtagaatcgcttgaatctgggaggcaggggttgcagtgagccgagattgcaccactgcactccagcctgggatgacagagcgagactccatctaaaaccaaaacaaaacaaaaaaacaaacccagagcactttagcctgaggtctcaggtgggacttgctgaatctcaagttccaactgattttctgggcagttcccctttgggtagagctcatcaaatgctttctccatgaacgggcatcagttgcaatcagcccagtgtggctttccagtgtgacagggcagcattgagttcagtcctgccttctcccttccccaagcacacagtcgctgcttgggtgactccagcctgggtgacagagcgagactctgtctcaaaaaaaaaaaaaaaagaatgctgaaaatataccctaatatctttaatatcttctgacttttagggttatgctgaaaggttcactgttagcctgatgaggtacgtcttttggatgactggcctattctctctagctgccatgaataattttctttcacgttgatcttggagaagttgatgagtatgttgtttgtggatggttttgttgtatagtatctcactggggtgttctgagtttcctaaatgtgaatgttggctctctagtgcggttggggaaatttttattgataatattctcaaatatgtttctcaagttgcttgcttcctttcttactcagggatgccaatgggtcataggttttgtctctttccataatcccataattctcagaggttttgttcattcttttaaattctattttttttatttttgtctgactgcgttgattcacagaagcagtcttttttaattttgtttttatttttgttttctgagatggagtttcgctcttgttgcccaggctggagtgcaatggcacaatcttgactcactgcaacctccacctcatgggttcaagcaattctcctgcctcagcctccctagtaactgggattacaggcatgcaccaccacgtccggcaaattttgtatttttagtagagatggggtttcaccatgttggtcaggttggtctcgaactcctgacctcagttgatccgcccgcctcagcttcccgaagtgctgggattacaggcgtgagtcaccacgcctggccatagaagcagtctttgagctctgagattttcttctcaccttggtctattttgccgttactactttttattatattatgcaatttttgtaatgagtttttcagctctataaaatcagtttctttctttcttaaaatgtctatttcatcttccacctctggtgtcattttactgggttccttatatcccttggattgggtttcaactttcttctgaacctcagtgatcttagtttggcatccagattctgaattctatgtctgccattttagccatttcattaaaaatcacaggatggccacgtaataaatgaaagtagcactgcacctctatcaccccatccttcagtcaggatcagcttggaataaagagggacttctccttgctggaaaaagctgagaaaaagacctagcagcttccatcaacactttggacacctgtagatctcaccattggagattccctttcacagacactaagcacagctgacggagctacccagattccacacagctgcactcacccaggagaaaagactgacactgtgccccactgtccacggccatcacggctctggcactatgccattgtggaatgggatctacttctggatctctgggggacacgtagccgcagcatcctttcactgctgagggattgtcactgctgagccagccttgcctggtggcctgccatccccaggctgagctgttgctctacactaccctgtcgtgccaagctgcctagagccactcgatccacctttcccagtggcagatgcatcctgaccctcagggaccgagctgaagtggaaacggtgccttgggtgttcacaagagtgatggcctgtgcctgcgctagtgtgacacgctgtgtattagggttctctagagggacacaactaatggcgtatatatgtgtgtgtgtgtgtgtgtaaaatcgtatctggtgtatatatatgtgtgtatatatacacatgtcaaaaatatatatgtatatgtgtgtgtatatatgtgtgtgtatatatgtgtgtgtatatgtgtgtgtatatgtgtgtgtatatatgtgtgtgcatatatgtttgtgtgtatatatatgtgtgtgtatatgtgtgtgtatatatgtgtgtgtatatatgtttgtgtgtatatatatgtgtgtgtatatatatgtttgtttatatatatgtgtgtatatatatgtgtgtatatatataaaatcatatctggggtatatatatgtgtgtatatatacacatatcaaaaaatatatatgtatatatgtgtgtatatatatgtgtatgtatatatgtgtgtgtatatatgtgtgtatatatatgtgtgtgtatatatgtttgtgtgtatatatatgtgtatgtatatatgtgtatgtatatatgtgtgtgtatatatgtgtgtgtatatatatgtgtgtgtatatatatgtttgtgtgtatatatgtgtgtatatatatgtttctgtgtatatatatgtgtgtatatatatgtttgtgtgtatatatatataatcgtatctggtgtatatatatgtacacatatcaaaaaatatatgtgtgtgtacatatatgtgtgtatatatatgtgtgtgtatatatatgtgtgtacatatatgtttgtgtgtatatatgtgtgtgtatatgtgtgtatatatataccctacatatatataccatacatatatatgtatatacaccatatctatatgggtgtttattaagtattaacacactattatacaaaaattagcctggtgtgtgtgtgtgtgtatacatatatatatataaaatcatatatgtgtgtatatatatgcatgtgtgtatatatatgtgtgtgtatatatatgtgtgtatatatacacatacatatatatgtatatacaccatatatatatgtgtgtgtgtatatatatatatatacgagtgtttattaagtattaactcacactattatacaaaaattagcccagtgtggtggtgcacgcctgtagtcccagctactcaggaggctgaggcaggagaatcagttgaacccggcagacggaggttgcagtgagccgagattgcgccactgcactccagcctggtgacggagtgagactccatctcaaaaattggactctagcctgggcaacaagagcaaaactctgcctgtctcaaaaaaaaaaaaaaaaaaaaaaaagacatgatccaggcaacatcgatggggcatcaccagggtctgtcctgtctgttgcagtccacactttgccctgctcatagccccatgaacttcatgttcatgtcttttcacactataacttcttccaggtctttgctggacacattaaaaaaatatatatatatataaaatgcttcatgaaatttgttaatatccttgtgcagctgccatgctgatcttctctgtatcattccgattttggtatatgtgctgccaaagcaacaacacactggacacatttatctacaaatgaggcaaacaaagcatatgggtgtgaatggggagaagtacagtgttctctgttgtaattgaccccgaggtcatcctttatatttaccagctttgctgtctatcaccctctctaggttctgcttaccttctgccagagttcgcatgagaaactctacttgtctcaactatcggcccaatgaaataaacataaatttcaaccttgaggcatctgagcacctgattattgtgcctgtttcaggctttcttgtgggagttgcccattgtgttagtttcttggaggctgatataacaaattatcacaaagtattgaataaaaagaagataaacttattctctcagagttctgcaggccagaaataaaaaatcaaaatgttcatataatttcttctttctagaggctctgaagaagaaacttctgtgctttttccttctttctttctttcttttttttttttttagatggaatctcgctctgtctcccaggctggactgcagtagcgcgatctcggctcactgcaagctccgcctcccgggttcatgccattctcctgcctcagcctccccagtagctgggactacaggtgcccgccaccacacccggataatttttttgtatttttagtagagacggggtttcaccatgttagccaggatggtctcgatctcctgacctcatgatctgcccgcctcggcctcccaaagtgctgggattacaggcatgagccaccacgcccggccacttttgtgcctttttcttagactttggtccttgctggcatttcttggcattccttggtttacagacttctcattctaatctctgcctccatcttcacatggcatcctattcttctctgtgtgtcttcttcatgtcttataaagatgtgagcaatattggatttagatcctgcccgaagccagcatgaccacatcttaactaattatacctgcaaagatcctatttccaaataagttcatattcacagctacgggaggttaggatgtcaacatacctttttggagacacagtgcaaaccccaaccccagtcatggttacctccagctatggagaattcatcactgccacagtgaattatctaagctgcccaaccaccctctcttcaccaaatcctcctcctcatcgttaaagaaaattacccaggccagtatgatatctttctccttacctgctgatgtactgtaatgaggaaacccaaggaaaaccagctacatcatcattttaggtacagagtaatttttgtgttgttccctggtagtggtttcttaccaggcagatcttctaacccagggtcacctaaaagtgcagtcacaggatgtgcacatctcccaagtgtgtcatctgtaaagttagtgatagatgctgttcattaaactctcactttactcccaagcccatgcattctacctgtcaaaagacataccatgatttattgttttatttattttttattattttttatttttttgacggagttttgcccttgttgcccaggctggagtgcaatggtgcaatcttggctcactgcaacctccgcctcccgggttcaggcgattctcctgcctcagcctcccaagtagctgggattacaggcgagcagcaccacgcctggctaatttttgtatttttaatagagatggcgtttcaccatgttgatcgggctggtctcgaactcctgaactcaggtgatccacctgccctggcctcccaaaatgctgggattacaggcgtgagccaccgcacctggtccatttattgtctttatagctatatctgtatgtatatcatctacagctttctgtatgcttatttacagctactgtaacagaacccccaaactgcagagtctcattcacaaactgttcaatacatccaatttcaagaggccatttcaatgttctttcagtcccagtaaaaccaaaccactgcatagtacatatctcaggtcattcccagaatatcacgtggccatgttctcattccctccacggattttgtgggcatctggattcccattctgagaataagtcatgggttatttcgtttaaacaagtcagacattctgagtgctcacagacccctgcgaggagctccgtcaaacccattttcagcacaagcatccttcagactaaggaaggtttgctgccccctcgtgggtggaatgtgttccatggcatcaagttactaccaggcatcacatccagacctctctgctggtcacaggtgagactttcagctacagtggtggctacgtggtccttggtgagagggagtcactggtgttgggttcatgcatgtcctcctttcttgctccatggctatcccattcacgggcccctcctgcttgcattgggcctgctgaccccacagctggatggattccactgcatcaattctgtactccacctggtgcctcccccagctgtggactgctcttgcttgcttctcagggataggctcatggtagggagtataaatttctcctgtcctcacccagcctcagtcttggacaatttctatatgagtgggccttgagggtggagcttgctcagtgtttgtgtccttcttccccttggcagctggattgtacttggtagctttggttgacttgggcaggaatttcctgtcccttccctgacatttgtatatctgggattatggtttcaggaattttctgcagtactcctagggatagagggacttttaaatctaccttcttatatccacaatgggtttttacctggggcctgagattggctggtttttctgaacctctctcaatgacttcagtctttttctacacatgggagaagtatctgggcagggggtgagatttcaggccacacactgtggaaggtaatcatgtctgatcacaaattttgggtctccaccttacttccaatctatgttgtgaatgcccagttgagacccacggaaaagagctcatgggtgagtgtgaagtgcttctctgtcttaagttcccagagatccttgcctcttggaggccagcaaacactaactcttgaggaattcatgacaatatcatctgattcctccttcccagcttgtatggcagtctcccaccctcatgtgttctgcctttgtagagcctgtcatggcatcctactcctccttggaattcaggttactcagttgctcccagagctcggatttctgatggtctcaggtgaaatctacattatggagttgatctgagttttactcatggttaggattgcagagaagctctttttttggagtgggggagggagggggagggatggagtttcgcttttgttgcccaggctggagtgcaatggcgtgttcttggctcactacaacctctgcctcctgggttcaagtgattctcctgcctcagcctccccagtagctgggattacgggcatgtgccaccatgcccagctttttttttgtatttttagtagagagagggtttcactatgttttccaggctcgtctcaaactcctgacctcaggcaatccacccacctcagcctcccaaaatgctgggattacaggtgtgagccaccgcacccagctagtgaaactctttccagctccccaaaccctgggcagaagccgggatatgaattatttatttacttactgagttatgtgacataactcacaccatatgaaatgcaccattttttagtgtacaaataaatggattttagtgtcttcactatgctgtgcaatcaccatccctacctcatcccacagcatttccatcacctcagaaagaacccccaagtagtcagtcctagttcttcccttccctcagccttaagaaatcactagtctactctcagtttctatggctttgtctattctggatatttcatgtgcataaaatcacaccaaatacacgtccttttgtagctgttgatggaaaagaagtggttaccatgaaggaactgaagttttccaaagacaaaattataatgtggcctgacagaagaagtacagaaattgataacaaaaacaaatccatcacaacttatcatgaatctggtcatgccattattgcatattacacaaaagatgaaatgtctatcaacaaagctacaatcatgccacaggggccaacatttggacctgtgtccccattacctggtgatgacagatggaatgaaaccagagcccagctgcttgcacaaatggacattagtatgggagcaagagtggcagaggagcttatatttggaattgaccatattacaacaggtgcttccagtgattttgctaatgccactaaaatggcaaagcagatggttatcaaatttggaattagcgaaaagcttggagttatgacctacagtgacacagggaaactaagtccagaaactcaatctgctattgaacatgaaataagaaccattctaagggactcatataaatgagcaaaacttattcaaaattcaaataattgtatgacatggttataacaaaacaccttcctaccccatccatagtatttatttagatgaacaaattttctcagtcctgtatctatacaaatgaaaactagatatagtattgacgtttagctctgtttcagtctaggaataagtaatatttaccagtggacttgtgaacaattaataaccataatcaagaagtatttttaaaacatttagcatcttaaatttatatagtagagatggatagggtgatccatgaaagatgtttaattatataattattacatttcgctaaaaacttgttggtgatgttgaatggaaaatcaagtcaaaaataaagaagaatgatgcaaaccttaaaaaaaatgagcaaaacttatcttgaaaagtcatgcagaggagcataagaatctagcagaagctttattgacctatgagactttaggtgccaaagagattcaaattgttcttcaggggaaaaagttggaagtgagatgagaactctcttgatgtggatgctttgctggttttattgcaagaatataagtagcattgcagtagtctccttttgcaatgctttctcctcattattgacgttgtgtaatttaagggtgtgaaacattttgtcaatattttgtcacgtttacccaattttggttattctcattatgacacccattgcaaatcagcatcccatggcaaatatatttttaaaactaaagaactatcaggattaaagacagctcatttgggaaatgtcaattagttatgaagttgaaagtaactaatgattttatggttggttactctactagaggtgaataaaacttcagcctttagccttctatatacatcagtggaaacttaattaagatgcattaattatgttccagattgaccatcaataaaatgtttttaaatctaaatgtagagaattgtaagcatacagttgcaacccgaatttaaatgattataaccttttggcatggtgtgatggctcacgcctctaatcccagcactttgggaggctgaggcgagtggaaggcttgagtctaggagttcgagaccagcctggcctacacggcgaaaccctgtctctactaaaattaaaaaaaatagcctcctgtggtggtgcacaactgtaatcccagctactcagaaggctgaggcacaaaaatttgcttgaactggttgcagtgagccaagatctcacaactccactctagcctgggcgacagagtgaaactttgtctcagtaaataaataaataaataaataattgtaaccttttaaaaataaaaaaacccaaacaaatatatgtcctttttttgtcattattcatgatagctaaatagtgaaaacaacccaaatgtccatcaattggtgaatgcataaaccaaatgtgatataggcatagaatggaatattcttcaacagtagaaaggaacaaagaccaattacatgctctagcgtgcagagaccacgaaaacattttgctatgtgcaattggatttttgccattttgttgttgtttttaatgtagtacatttattttaatttattatttttttaaaaaaaattcaatagcttttggggaacaggtggtgtttggttacgtggataagctctttagtggtgatttttgagattttggtgcattcatcacccgagcagtgtacactgcacccaatgtgtagtcttttatcgctcatccccctcccattgttccctgtgagtccccagattccattatatccttcttatgcctttgcatcctcatagtttagctcccacttatgagaccatatgatgtttggttttccatttctgaattacttcacttggaataatggtctccaactgcatctaggttgctgcgaatgccattattttgtccctttttgtggctgagtagtattccgtgctgtgtgtgtgtatatacacacatacacatacatgtttttcatatgtttgtggaccgttcgtatatcttcttttgagagttgtcacaaagggaattggatttggagggaacaattttatggccatttttcagtataatcatcgggtgaagacagtgtctgttcggccagtgtcgctttaatccattacctgtagccaggaagggagacgtttatcgcagagataggcaccaacctggaatgctttcctcaaaggcgattaactgtagtgtgaacccgaaatttcaccgcagtttggtcctgatttggcacaagatatgctttatccactgatgtgaaatgtccaggtgtttttttgtacggttttgttgctgaaagacacaataccctctaatctaaggcatcctctccaaatcccactgaacaataccctctaatctaaggcatcctctccaaatcccactgaggcacaggagtgacactagagagggggtcacggagcttcctgagagagattcgcctcctgaaccctgggcagatcctccccaccttgggatctctgtgaacctctggggtcttctattcaatcaggaccaagttgtgaggtgggattccttccaggctacagtctcccctctccctctttcaattttatcaagacagatcagaggtttgtgggagggagtcatggcgtctcctccacagcccccagctgtgcagatggatgaggccaccgttcctggatggagtaaatctactgggaacctgggttctccatcacgaggttgtcccgtcatcagccccaaaagaaggggaactgccctctccgggagcttgactttcatttccccaaggctgggactggggcaggcaccaggctgtcttcagatacttcatacagaaatggtatctccctgacccttttctgcgatttgcctcatctgtcctcatctcatcaagggtcaggacgtaggagccgatagacccagcacctttctgagtctgtcctgtccaagtgagggtgagtgggggcttgttcttcttctcagagcctccctgtggggtcctcttccctccttcagcctgtccatcaacacagcattgcgggatccttaccatggcatccagccctggagatgcttcaggaaagttgcaggtccatgctgcaggacaggctcagatcagcagagacgcatctcacatcgggctgtgaaattcaagttgagctgcaattggcaatgagaagaaaaaaggagaaataaagaaatgctgactcttcttttgtctttggagtatgggttttatttcttccagtttccttcttagacttcccttcttttttttcttcctattttttttaatagtgttcaggtccccctcccttaaaagtaacctctgagtcattcctgcctccttggcgtccctcccacccccagccccgcttccttgggcattcccctgcatctcagtctgccttcaaggttttgggaacaagtacttgtcttgagctctgatttgggggtgggatagggagttaattttttctgaattgctcaccttcatccctgcgtgcatgaccttgggcagtaagtcccatctctgagcctcggtttcctcatttggagcctgttgtcatgaacccccctcctgagtggttttgggggccagtggtgcctgggtcatgggagggcctcagtcatggtacatttccagaccgggttaagtcttgggggttgaaacatgagtggatcctggtgttggactgcacagtcacggtgagtgacttatgtgctcaacagcccacatctgctcctaacactgggaaaacctacttataatgtgtctgaaatatgtagccatggtccaatgaagaaaatgagaaatgagacttcctgtcataggcaggaaaccttaagaagcagaagatgccagcgccgaggggctgctggtgacttgcaaagctgggggtcactaagggggaggtttctgcctctgtatgagacagaggagaaccccagggccctcacagacagggaggggtcggggttttggatgaaagtgggaagttgtggctccttctcccctgtgtttgtggatggcactgggatatctctgctcattgactcaggtccatggtcagccctgagccgcctcctccatgtgtgtgaaacagattcactgcagcgttgtcacacatgggcgtctgtcccacatgcgagtctgaggctcacactggaccctccctgctggttacagccctgagtagactcatgtggcactggcaggtggaaccatctccccttttccagccttaactcccagcacagccctggtggaaaccctctctggaagatgaggcatgtgggaagcatgtgtccaaaaatgacaaggagaaggaattatcctaatgatcaaaagtgctatgatgggccaggcaccgtggctcatgcctgcagtcccagcactttgggaggtcaaggcgggcgggtcacttgggcccaggagttcaagaccagcctgggcaacatggcaaaacctcatctctacaagaaatacaaaaattagctggatgtggtgtcatgaataatggcctccagctcatccaggttgctgcaaaactcaatcccttgtacatcagttgcaaaaaattaaaaatatctaagaatatacctaactgaggaggtgaaagatctctacaagaagaacaacaaaatgctgcagaaagaaatcgtagatgacacagcaaaatagaaatatatcccatgctcatggattggcagaatcaatattgtgaaaatgatcacacttcccaaagcaatatttaggttcaatgcaattcccatcaaaatatcaacatcatttttttcacagaattagaaaaaaatcctaaaattcatatggaaccaaaaagaggatgaataccaaagcaatcttaagcaaaaagacaaatgtaaatttaataaacatatcctaggctgaattgtagggggtttgtttttgctcacttcaacctccacctcccgggttcattcaagtgatcctcctgcctctgcctcccaagtagctgggattgcagcgtgcgccaccatgtccagctaatttttgtatttttagtagagatggggttttgccttgttggccatgctggtcttgaactcccggcctcaagtaatctgtggcctctgcctccctaggtgttgagattacaggcgtgagccaccgcacccgggcacattgcctctttttctattctcaagaaacatttgtgatgctctgggtgtgtttgtgtgtttcattagtgcgtcaatatttgtaagaaatcaccagtgaaacttcctgaactggagttgatacgatgggaacatttttattacagtcaatgtttttcacacacacacacacacacacacacacacatatatatacacacacatacacacacatttaaaatgagtcagattctctgattactcttacgttcattatgtaaactccagttttgaatatttcatccatttaatctgcattttctagtatattggtataggtttgcagcctgttctggggttagtttgtgaaaatgtgtgtaggatctgctgggctgtctgctggctcactcccatatggaaatgcgtgcctgctctttctttctcttgctcaatgtagttaggatttatgactgtaattaatattttcaagaatgagcttcattggctttgttgaattttcaagttttggtttttcctcatgagcaactcttcttcttcttattccctttcttacaccttcatttggaataattggttattctttttctaaattccttatacgaaagccaacgtcattcatttcctagtttttttttttcgtttctacttttttcatttgtggtttgtactttttcaatttcattgtgtgatgtgtaatatttatattgtgattcagtttaaagcacattcttacttctgattttagttttctcggttaactcattgattattgagaagtctgttgctttaattaaaaaatgtagggatattagttatttcgactgcagaatcaagtgagtcccaaagttcccagcatctcctcatggtctttgttaggggtccaggctgactggggttcattggtgtccactgggggcagctcccgtgccttcagcagtcctgagtctccttctactgagtgtggagtctgcgtaccctccgggctagtggatggccagggtggcgtagatgctgggctcagctggaggttccctttcctgggatggaggaggctcagttgccttccgtctgagggtcaagctgtgcagctgggcgtaggtcacatcctggggggcttcagatgcagcagcctgcagcgggggagagtgagaggtaaggaacgtggtgggggtgggggaggcctgggggcctggagaggaaaggactctctcagtgtccatctgtctgtcctcttctgcctgtctgtcctttgtgtccaggaattccccggacagtggggagggaggagaggccatttctctcctaggtctggagtgtttcaccggggcatatgtcactgcctgggggtcttcatcatgtgggctctgctggagagagacagtggtggggggtgtccttgagtccccctgacctcctggagtcaattttcctcactgttcccggggtgatccgattacatccctttcccgatggaatctcagggacgccctaaggccgtggagggtctggccgctcccttcctgtggttctggcctctgctcctcactttgaccttgcccatttggctgcagcctcatgggccttcccgcaagagctcgctgctgcctcggggcctttgcacggctgtttcctctgcctgcaggggctcgtccattagaggatcgtgtgccccactctgtccaggcttctcagatgacagctgagcagacagccctccccttccattcagactggccccactgccccacactctctgccctttccctggtgtatgttcctttaagcacgttgcactcctggacatggcgcatttatttgcattttgtctcccaccatgaggtgagctcaggaggcgggggcggctttgctccctgct
